(19) United States
(12) Patent Application Publication
(10) Pub. No.: US 2024/0117345 A1
(43) Pub. Date: Apr. 11, 2024

(54) COMPOSITIONS AND METHODS FOR TREATING TRANSTHYRETIN AMYLOIDOSIS

(71) Applicant: Beam Therapeutics Inc., Cambridge, MA (US)

(72) Inventors: Michael PACKER, Cambridge, MA (US); Lo-I CHENG, Cambridge, MA (US); Tanggis BOHNUUD, Cambridge, MA (US)

(73) Assignee: Beam Therapeutics Inc., Cambridge, MA (US)

(21) Appl. No.: 18/507,980

(22) Filed: Nov. 13, 2023

Related U.S. Application Data
(63) Continuation of application No. PCT/US2022/029278, filed on May 13, 2022.
(60) Provisional application No. 63/189,060, filed on May 14, 2021.

(51) Int. Cl. C12N 15/11; A61K 48/00; C12N 9/22; C12N 9/78

(52) U.S. Cl. CPC C12N 15/111; A61K 48/005; C12N 9/22; C12N 9/78; C12N 15/11; C12Y 305/04004; C12Y 305/04005; C12N 2310/20; C12N 2320/34; C12N 2800/80

(57) ABSTRACT

The invention features compositions and methods for editing a transthyretin polynucleotide sequence to treat amyloidosis.

### CROSS-REFERENCE TO RELATED APPLICATIONS

[0001] This application is a continuation under 35 U.S.C. § 111(a) of PCT International Patent Application No. PCT/US2022/029278, filed May 13, 2022, designating the United States and published in English, which claims priority to and the benefit of U.S. Provisional Application No. 63/189,060, filed May 14, 2021, the entire contents of each of which are incorporated by reference herein.

### SEQUENCE LISTING

[0002] This present application contains a Sequence Listing which has been submitted electronically in XML format and is herein incorporated by reference in its entirety. The Sequence Listing XML file, created on Nov. 13, 2023, is named 180802-055003US_SL.xml and is 1,694,928 bytes in size.

### BACKGROUND OF THE INVENTION

[0003] Amyloidosis is a condition characterized by the buildup of abnormal deposits of amyloid protein in the body's organs and tissues. These protein deposits can occur in the peripheral nervous system, which is made up of nerves connecting the brain and spinal cord to muscles and sensory cells that detect sensations such as touch, pain, heat, and sound. Protein deposits in these nerves can result in a loss of sensation in the extremities (peripheral neuropathy). The autonomic nervous system, which controls involuntary body functions such as blood pressure, heart rate, and digestion, can also be affected by amyloidosis. In some cases, the brain and spinal cord (central nervous system) are affected. Mutations in the transthyretin (TTR) gene can cause transthyretin amyloidosis. Furthermore, patients expressing wild-type TTR may also develop amyloidosis. Liver transplant remains the gold standard for treating transthyretin amyloidosis.

[0004] Thus, there remains a need for compositions and methods for editing transthyretin polynucleotide sequences. These methods can be used for the treatment of amyloidosis.

### SUMMARY OF THE INVENTION

[0005] As described below, the present invention features compositions and methods for editing a transthyretin polynucleotide sequence to treat transthyretin amyloidosis.

[0006] In one aspect, the invention of the disclosure features a method for editing a transthyretin (TTR) polynucleotide sequence. The method involves: contacting the polynucleotide sequence with a guide RNA and a base editor containing a polynucleotide programmable DNA binding polypeptide and a deaminase. The guide RNA targets the base editor to effect an alteration of a nucleobase of the TTR polynucleotide sequence.

[0007] In another aspect, the invention of the disclosure features a method for editing a transthyretin (TTR) polynucleotide sequence. The method involves: contacting the polynucleotide sequence with a guide RNA and a fusion protein containing a polynucleotide programmable DNA binding domain and an adenosine deaminase domain. The adenosine deaminase domain contains an arginine (R) or a threonine (T) at amino acid position 147 of the following amino acid sequence, and the adenosine deaminase domain has at least about 85% sequence identity to the following amino acid sequence: MSEVEFSHEYWMRHALTLAKRARDEREVPVGAVLVLNNRVIGEGWNRAIGLHDPTAHAEIMALR QGGLVMQNYRLIDATLYVTFEPCVMCAGAMIHSRIGRVVFGVRNAKTGAAGSLMDVLHYPGMNH RVEITEGILADECAALLCYFFRMPRQVFNAQKKAQSSTD (SEQ ID NO: 4; TadA*7.10). The guide RNA targets the fusion protein to effect an alteration of a nucleobase of the TTR polynucleotide sequence.

[0008] In another aspect, the invention of the disclosure features a method for editing a transthyretin (TTR) polynucleotide sequence. The method involves: contacting the polynucleotide sequence with a guide RNA and a fusion protein containing a polynucleotide programmable DNA binding domain and a cytidine deaminase domain. The cytidine deaminase domain contains an amino acid sequence with at least about 85% sequence identity to the amino acid sequence: MSSETGPVAVDPTLRRRIEPHEFEVFFDPRELRKETCLLYEINWGGRHSIWRHTSQNTNKHVEV NFIEKFTTERYFCPNTRCSITWFLSWSPCGECSRAITEFLSRYPHVTLFIYIARLYHHADPRNR QGLRDLISSGVTIQIMTEQESGYCWRNFVNYSPSNEAHWPRYPHLLWVRLYVLELYCIILGLPPC LNILRRKQPQLTFFTIALQSCHYQRLPPHILWATGLK (SEQ ID NO: 15; BE4 cytidine deaminase domain). The guide RNA targets the fusion protein to effect an alteration of a nucleobase of the TTR polynucleotide sequence.

[0009] In another aspect, the invention of the disclosure features a method for editing a transthyretin (TTR) polynucleotide sequence. The method involves: contacting the polynucleotide sequence with a guide RNA and a Cas12b endonuclease, where the guide RNA targets the endonuclease to effect a double-stranded break of the TTR polynucleotide sequence.

[0010] In another aspect, the invention of the disclosure features a method for treating amyloidosis in a subject. The method involves administering to the subject a guide RNA and a fusion protein containing a polynucleotide programmable DNA binding domain and an adenosine deaminase domain. The adenosine deaminase domain contains an arginine (R) or a threonine (T) at amino acid position 147 of the following amino acid sequence, and the adenosine deaminase domain has at least about 85% sequence identity to the following amino acid sequence MSEVEFSHEYWMRHALTLAKRARDEREVPVGAVLVLNNRVIGEGWNRAIGLHDPTAHAEIMALR QGGLVMQNYRLIDATLYVTFEPCVMCAGAMIHSRIGRVVFGVRNAKTGAAGSLMDVLHYPGMNH RVEITEGILADECAALLCYFFRMPRQVFNAQKKAQSSTD (SEQ ID NO: 4; TadA*7.10). The guide RNA targets the fusion protein to effect an alteration of a nucleobase of the TTR polynucleotide sequence.

[0011] In another aspect, the invention of the disclosure features a method for treating amyloidosis in a subject. The method involves administering to the subject a guide RNA and a fusion protein containing a polynucleotide programmable DNA binding domain and a cytidine deaminase domain. The cytidine deaminase domain contains an amino acid sequence with at least about 85% sequence identity to the amino acid sequence: MSSETGPVAVDPTLRRRIEPHEFEVFFDPRELRKETCLLYEINWGGRHSIWRHTSQNTNKHVEV NFIEKFTTERYFCPNTRCSITWFLSWSPCGECSRAITEFLSRYPHVTLFIYIARLYHHADPRNR QGLRDLISSGVTIQIMTEQESGYCWRNFVNYSPSNEAHWPRYPHLWVRLYVLELYCIILGLPPC LNILRRKQPQLTFFTIALQSCHYQRLPPHILWATGLK (SEQ ID NO: 15). The guide RNA targets the fusion protein to effect an alteration of a nucleobase of the TTR polynucleotide sequence.

[0012] In another aspect, the invention of the disclosure features a method for treating amyloidosis in a subject. The method involves administering to the subject a guide RNA and a polynucleotide encoding a base editor containing a polynucleotide programmable DNA binding polypeptide and a deaminase. The guide RNA targets the base editor to effect an alteration of a nucleobase of the TTR polynucleotide sequence.

[0013] In another aspect, the invention of the disclosure features a method for editing a transthyretin (TTR) polynucleotide sequence in a subject. The method involves administering to a subject a guide RNA and a Cas12b endonuclease. The guide RNA targets the endonuclease to effect a double-stranded break of the TTR polynucleotide sequence.

[0014] In another aspect, the invention of the disclosure features a composition containing one or more polynucleotides encoding a fusion protein and a guide RNA. The guide RNA contains a nucleic acid sequence that is complementary to a transthyretin (TTR) polynucleotide. The fusion protein contains a polynucleotide programmable DNA binding domain and a deaminase domain.

[0015] In another aspect, the invention of the disclosure features a composition containing one or more polynucleotides encoding an endonuclease and a guide RNA. The guide RNA contains a nucleic acid sequence that is complementary to a transthyretin (TTR) polynucleotide. The endonuclease contains the amino acid sequence:

bhCas12b v4MAPKKKRKVGIHGVPAAATRSFILKIEPNEEVKKGLWKTHEVLNHGIAYYMNILKLIRQEAI YEHHEQDPKNPKKVSKAEIQAELWDFVLKMQKCNSFTHEVDKDEVFNILRELYEELVPSSVEKK GEANQLSNKFLYPLVDPNSQSGKGTASSGRKPRWYNLKIAGDPSWEEEKKKWEEDKKKDPLAKI LGKLAEYGLIPLFIPYTDSNEPIVKEIKWMEKSRNQSVRRLDKDMFIQALERFLSWESWNLKVK EEYEKVEKEYKTLEERIKEDIQALKALEQYEKERQEQLLRDTLNTNEYRLSKRGLRGWREIIQK WLKMDENEPSEKYLEVFKDYQRKHPREAGDYSVYEFLSKKENHFIWRNHPEYPYLYATFCEIDK KKKDAKQQATFTLADPINHPLWVRFEERSGSNLNKYRILTEQLHTEKLKKKLTVQLDRLIYPTE SGGWEEKGKVDIVLLPSRQFYNQIFLDIEEKGKHAFTYKDESIKFPLKGTLGGARVQFDRDHLR RYPHKVESGNVGRIYFNMTVNIEPTESPVSKSLKIHRDDFPKVVNFKPKELTEWIKDSKGKKLK SGIESLEIGLRVMSIDLGQRQAAAASIFEVVDQKPDIEGKLFFPIKGTELYAVHRASFNIKLPG ETLVKSREVLRKAREDNLKLMNQKLNFLRNVLHFQQFEDITEREKRVTKWISRQENSDVPLVYQ DELIQIRELMYKPYKDWVAFLKQLHKRLEVEIGKEVKHWRKSLSDGRKGLYGISLKNIDEIDRT RKFLLRWSLRPTEPGEVRRLEPGQRFAIDQLNHLNALKEDRLKKMANTIIMHALGYCYDVRKKK WQAKNPACQIILFEDLSNYNPYGERSRFENSRLMKWSRREIPRQVALQGEIYGLQVGEVGAQFS SRFHAKTGSPGIRCRVVTKEKLQDNRFFKNLQREGRLTLDKIAVLKEGDLYPDKGGEKFISLSK DRKCVTTHADINAAQNLQKRFWTRTHGFYKVYCKAYQVDGQTVYIPESKDQKQKIIEEFGEGYF ILKDGVYEWVNAGKLKIKKGSSKQSSSELVDSDILKDSFDLASELKGEKLMLYRDPSGNVFPSD KWMAAGVFFGKLERILISKLTNQYSISTIEDDSSKQSMSGGSKRTADGSEFESPKKKRKVE (SEQ ID NO: 450). The guide RNA targets the endonuclease to effect a double-stranded break of the TTR polynucleotide sequence.

[0016] In another aspect, the invention of the disclosure features a pharmaceutical composition for the treatment of transthyretin (TTR) amyloidosis. The pharmaceutical composition contains: an endonuclease, or a nucleic acid encoding the endonuclease, and a guide RNA (gRNA) containing a nucleic acid sequence complementary to an transthyretin (TTR) polynucleotide in a pharmaceutically acceptable excipient. The endonuclease contains the amino acid sequence:

bhCas12b
(SEQ ID NO: 450)
v4MAPKKKRKVGIHGVPAAATRSFILKIEPNEEVKKGLWKTHEVLNHGIAYYMNILKLIRQEAI
YEHHEQDPKNPKKVSKAEIQAELWDFVLKMQKCNSFTHEVDKDEVENILRELYEELVPSSVEKK
GEANQLSNKFLYPLVDPNSQSGKGTASSGRKPRWYNLKIAGDPSWEEEKKKWEEDKKKDPLAKI
LGKLAEYGLIPLFIPYTDSNEPIVKEIKWMEKSRNQSVRRLDKDMFIQALERFLSWESWNLKVK
EEYEKVEKEYKTLEERIKEDIQALKALEQYEKERQEQLLRDTLNTNEYRLSKRGLRGWREIIQK
WLKMDENEPSEKYLEVFKDYQRKHPREAGDYSVYEFLSKKENHFIWRNHPEYPYLYATFCEIDK
KKKDAKQQATFTLADPINHPLWVRFEERSGSNLNKYRILTEQLHTEKLKKKLTVQLDRLIYPTE
SGGWEEKGKVDIVLLPSRQFYNQIFLDIEEKGKHAFTYKDESIKFPLKGTLGGARVQFDRDHLR
RYPHKVESGNVGRIYFNMTVNIEPTESPVSKSLKIHRDDFPKVVNFKPKELTEWIKDSKGKKLK
SGIESLEIGLRVMSIDLGQRQAAAASIFEVVDQKPDIEGKLFFPIKGTELYAVHRASENIKLPG
ETLVKSREVLRKAREDNLKLMNQKLNFLRNVLHFQQFEDITEREKRVTKWISRQENSDVPLVYQ
DELIQIRELMYKPYKDWVAFLKQLHKRLEVEIGKEVKHWRKSLSDGRKGLYGISLKNIDEIDRT
RKFLLRWSLRPTEPGEVRRLEPGQRFAIDQLNHLNALKEDRLKKMANTIIMHALGYCYDVRKKK
WQAKNPACQIILFEDLSNYNPYGERSRFENSRLMKWSRREIPRQVALQGEIYGLQVGEVGAQFS
SRFHAKTGSPGIRCRVVTKEKLQDNRFFKNLQREGRLTLDKIAVLKEGDLYPDKGGEKFISLSK
DRKCVTTHADINAAQNLQKRFWTRTHGFYKVYCKAYQVDGQTVYIPESKDQKQKIIEEFGEGYF
ILKDGVYEWVNAGKLKIKKGSSKQSSSELVDSDILKDSFDLASELKGEKLMLYRDPSGNVEPSD
KWMAAGVFFGKLERILISKLTNQYSISTIEDDSSKQSMSGGSKRTADGSEFESPKKKRKVE,

where the guide RNA targets the endonuclease to effect a double-stranded break of the TTR polynucleotide sequence.

[0017] In another aspect, the invention of the disclosure features a pharmaceutical composition for the treatment of transthyretin (TTR) amyloidosis. The pharmaceutical composition contains the composition of any of the above aspects, or embodiments thereof, and a pharmaceutically acceptable excipient.

[0018] In another aspect, the invention of the disclosure features a method of treating transthyretin (TTR) amyloidosis. The method involves administering to a subject in need thereof the pharmaceutical composition of any of the above aspects, or embodiments thereof.

[0019] In another aspect, the invention of the disclosure features use of the composition of any of the above aspects, or embodiments thereof, in the treatment of transthyretin (TTR) amyloidosis in a subject.

[0020] In another aspect, the invention of the disclosure features a method for treating amyloidosis in a subject. The method involves systemically administering to the subject a guide RNA and a fusion protein containing a polynucleotide programmable DNA binding domain and a deaminase domain. The guide RNA targets the base editor to effect an alteration of a nucleobase of the TTR polynucleotide sequence present in a liver cell of the subject.

[0021] In any of the above aspects, or embodiments thereof, the deaminase is an adenosine deaminase or a cytidine deaminase.

[0022] In any of the above aspects, or embodiments thereof, the editing introduces an alteration that corrects a mutation in a TTR polynucleotide. In any of the above aspects, or embodiments thereof, the editing introduces an alteration that reduces or eliminates expression of a TTR polypeptide. In any of the above aspects, or embodiments thereof, the editing introduces an alteration that reduces or eliminates expression of a TTR polypeptide by at least about 50% relative to a reference. In any of the above aspects, or embodiments thereof, the alteration is in a splice acceptor, splice donor, intronic sequence, exonic sequence, enhancer, or promoter.

[0023] In any of the above aspects, or embodiments thereof, the base editor contains a deaminase in complex with the polynucleotide programmable DNA binding polypeptide and the guide RNA, or the base editor is a fusion protein containing the polynucleotide programmable DNA binding polypeptide and the deaminase.

[0024] In any of the above aspects, or embodiments thereof, the alteration is in a promoter. In any of the above aspects, or embodiments thereof, the alteration is in a region of the TTR promoter corresponding to nucleotide positions +1 to −225 of the TTR promoter, where position +1 corresponds to A of the start codon (ATG) of the TTR polynucleotide sequence. In any of the above aspects, or embodiments thereof, the alteration is in a region of the TTR promoter corresponding to nucleotide positions +1 to −198 of the TTR promoter, where position +1 corresponds to A of the start codon (ATG) of the TTR polynucleotide sequence. In any of the above aspects, or embodiments thereof, the alteration is in a region of the TTR promoter corresponding to nucleotide positions +1 to −177 of the TTR promoter, where position +1 corresponds to A of the start codon (ATG) of the TTR polynucleotide sequence. In any of the above aspects, or embodiments thereof, the alteration is in a region of the TTR promoter corresponding to nucleotide positions −106 to −176 of the TTR promoter, where position +1 corresponds to A of the start codon (ATG) of the TTR polynucleotide sequence. In any of the above aspects, or embodiments thereof, the alteration is in a TATA box or ATG start codon.

[0025] In any of the above aspects, or embodiments thereof, alteration of the nucleobase disrupts gene splicing.

[0026] In any of the above aspects, or embodiments thereof, the TTR polynucleotide sequence encodes a mature TTR polypeptide containing a pathogenic alteration selected from one or more of T60A, V30M, V30A, V30G, V30L, V122I, and V122A. In any of the above aspects, or embodiments thereof, the pathogenic alteration is V122I.

[0027] In any of the above aspects, or embodiments thereof, the adenosine deaminase converts a target A•T to G•C in the TTR polynucleotide sequence. In any of the above aspects, or embodiments thereof, the cytidine deaminase converts a target C•G to T•A in the TTR polynucleotide sequence.

[0028] In any of the above aspects, or embodiments thereof, the altered nucleobase is 4A of the nucleotide sequence TATAGGAAAACCAGTGAGTC (SEQ ID NO: 425; TSBT×2602/gRNA1598 target site sequence corresponding to sgRNA_361); 6A of the nucleotide sequence TACTCACCTCTGCATGCTCA (SEQ ID NO: 426; TSBT×2603/gRNA1599 target site sequence corresponding to sgRNA_362); 5A of the nucleotide sequence ACTCACCTCTGCATGCTCAT (SEQ ID NO: 427; TSBT×2604/gRNA1606 target site sequence corresponding to sgRNA_363); 7A of the nucleotide sequence ATACTCACCTCTGCATGCTCA (SEQ ID NO: 429; TSBT×2606 target site sequence corresponding to sgRNA_365); 6A of the nucleotide sequence TTGGCAGGATGGCTTCTCATCG (SEQ ID NO: 431; TSBT×2608/gRNA-#19 target site corresponding to sgRNA_367); 9A of the sequence TTGGCAGGATGGCTTCTCATCG (SEQ ID NO: 431; TSBT×2608/gRNA-#19 target site corresponding to sgRNA_367); 5A of the sequence GGCTATCGTCACCAATCCCA (SEQ ID NO: 439; corresponding to sgRNA 375); or 4A of the sequence GCTATCGTCACCAATCCCAA (SEQ ID NO: 440; corresponding to sgRNA_376). In any of the above aspects, or embodiments thereof, the altered nucleobase is 7C of the nucleotide sequence TACT CACCTCTGCATGCTCA (SEQ ID NO: 426; TSBT×2603/gRNA1599 target site corresponding to sgRNA_362); 6C of the nucleotide sequence ACTCACCTCTGCATGCTCAT (SEQ ID NO: 427; TSBT×2604/gRNA1606 target site corresponding to sgRNA_363); 7C of the nucleotide sequence TACCACCTATGAGAGAAGAC (SEQ ID NO: 428; TSBT×2605 target site corresponding to sgRNA_364); 8C of the nucleotide sequence ATACTCACCTCTGCATGCTCA (SEQ ID NO: 429; TSBT×2606 target site corresponding to sgRNA_365); or 11C of the nucleotide sequence ACTGGTTTTCCTATAAGGTGT (SEQ ID NO: 430; TSBT×2607 target site corresponding to sgRNA_366).

[0029] In any of the above aspects, or embodiments thereof, the polynucleotide programmable DNA binding domain contains a Cas polypeptide. In any of the above aspects, or embodiments thereof, the polynucleotide programmable DNA binding domain contains a Cas9 or a Cas12 polypeptide or a fragment thereof. In embodiments, the Cas9 polypeptide contains a Streptococcus pyogenes Cas9 (SpCas9), Staphylococcus aureus Cas9 (SaCas9), Streptococcus thermophilus 1 Cas9 (St1Cas9), or Streptococcus canis Cas9 (ScCas9). In embodiments, the Cas 12 polypeptide contains a Cas12a, Cas12b, Cas12c, Cas12d, Cas12e, Cas12g, Cas12h, or Cas12i. In embodiments, the Cas12 polypeptide contains a sequence with at least about 85% amino acid sequence identity to Bacillus hisashii Cas12b, Bacillus thermoamylovorans Cas12b, Bacillus sp. V3-13 Cas12b, or Alicyclobacillus acidiphilus Cas12b.

[0030] In any of the above aspects, or embodiments thereof, the polynucleotide programmable DNA binding domain contains a Cas9 polypeptide with a protospacer-adjacent motif (PAM) specificity for a nucleic acid sequence selected from 5′-NGG-3′, 5′-NAG-3′, 5′-NGA-3′, 5′-NAA-3′, 5′-NNAGGA-3′, 5′-NNGRRT-3′, or 5′-NNACCA-3′. In any of the above aspects, or embodiments thereof, the polynucleotide programmable DNA binding domain contains a Cas9 polypeptide with specificity for an altered protospacer-adjacent motif (PAM). In embodiments, the nucleic acid sequence of the altered PAM is selected from 5′-NNNRRT-3′, 5′-NGA-3′, 5′-NGCG-3′, 5′-NGN-3′, 5′-NGCN-3′, 5′-NGTN-3′, and 5′-NAA-3′.

[0031] In any of the above aspects, or embodiments thereof, the polynucleotide programmable DNA binding domain is a nuclease inactive or nickase variant. In embodiments, the nuclease inactivated variant is a Cas9 (dCas9) containing the amino acid substitution D10A or a substitution at a corresponding amino acid position. In embodiments, the nuclease inactivated variant is a bhCas12b containing the amino acid substitutions D952A, S893R, K846R, and E837G, or substitutions at corresponding amino acid positions.

[0032] In any of the above aspects, or embodiments thereof, the adenosine deaminase domain is capable of deaminating adenine in deoxyribonucleic acid (DNA). In any of the above aspects, or embodiments thereof, the cytidine deaminase domain is capable of deaminating cytidine in deoxyribonucleic acid (DNA). In embodiments, the adenosine deaminase is a TadA deaminase.

[0033] In embodiments, the TadA deaminase is TadA*7.10, TadA*8.1, TadA*8.2, TadA*8.8, TadA*8.9, TadA*8.10, TadA*8.11, TadA*8.12, TadA*8.13, TadA*8.15, TadA*8.16, TadA*8.19, TadA*8.20, TadA*8.21, or TadA*8.24. In embodiments, the TadA deaminase is TadA*7.10. TadA*8.8, or TadA*8.13.

[0034] In any of the above aspects, or embodiments thereof, the base editor contains a fusion protein containing the deaminase flanked by an N-terminal fragment and a C-terminal fragment of the programmable DNA binding polypeptide, where the DNA binding polypeptide is a Cas9 polypeptide. In any of the above aspects, or embodiments thereof, the deaminase is inserted between amino acid positions 1029-1030 or 1247-1248 of a sequence with at least about 70%, 80%, 85%, 90%, 95%, or 100% sequence identity to the following amino acid sequence: spCas9

(SEQ ID NO: 201)
MDKKYSIGLDIGTNSVGWAVITDEYKVPSKKFKVLGNTDRHSIKKNLIGALLFDSGETAEATRL
KRTARRRYTRRKNRICYLQEIFSNEMAKVDDSFFHRLEESFLVEEDKKHERHPIFGNIVDEVAY
HEKYPTIYHLRKKLVDSTDKADLRLIYLALAHMIKFRGHFLIEGDLNPDNSDVDKLFIQLVQTY
NQLFEENPINASGVDAKAILSARLSKSRRLENLIAQLPGEKKNGLFGNLIALSLGLTPNFKSNE
DLAEDAKLQLSKDTYDDDLDNLLAQIGDQYADLFLAAKNLSDAILLSDILRVNTEITKAPLSAS
MIKRYDEHHQDLTLLKALVRQQLPEKYKEIFFDQSKNGYAGYIDGGASQEEFYKFIKPILEKMD
GTEELLVKLNREDLLRKQRTFDNGSIPHQIHLGELHAILRRQEDFYPFLKDNREKIEKILTFRI
PYYVGPLARGNSRFAWMTRKSEETITPWNFEEVVDKGASAQSFIERMTNEDKNLPNEKVLPKHS
LLYEYFTVYNELTKVKYVTEGMRKPAFLSGEQKKAIVDLLFKTNRKVTVKQLKEDYFKKIECFD
SVEISGVEDRFNASLGTYHDLLKIIKDKDELDNEENEDILEDIVLTLTLFEDREMIEERLKTYA
HLFDDKVMKQLKRRRYTGWGRLSRKLINGIRDKQSGKTILDFLKSDGFANRNFMQLIHDDSLTE
KEDIQKAQVSGQGDSLHEHIANLAGSPAIKKGILQTVKVVDELVKVMGRHKPENIVIEMARENQ
TTQKGQKNSRERMKRIEEGIKELGSQILKEHPVENTQLQNEKLYLYYLQNGRDMYVDQELDINR
LSDYDVDHIVPQSFLKDDSIDNKVLTRSDKNRGKSDNVPSEEVVKKMKNYWRQLLNAKLITQRK
FDNLTKAERGGLSELDKAGFIKRQLVETRQITKHVAQILDSRMNTKYDENDKLIREVKVITLKS
KLVSDFRKDFQFYKVREINNYHHAHDAYLNAVVGTALIKKYPKLESEFVYGDYKVYDVRKMIAK
SEQEIGKATAKYFFYSNIMNFFKTEITLANGEIRKRPLIETNGETGEIVWDKGRDFATVRKVLS
MPQVNIVKKTEVQTGGFSKESILPKRNSDKLIARKKDWDPKKYGGFDSPTVAYSVLVVAKVEKG
KSKKLKSVKELLGITIMERSSFEKNPIDFLEAKGYKEVKKDLIIKLPKYSLFELENGRKRMLAS
AGELQKGNELALPSKYVNFLYLASHYEKLKGSPEDNEQKQLFVEQHKHYLDEIIEQISEFSKRV
ILADANLDKVLSAYNKHRDKPIREQAENIIHLFTLTNLGAPAAFKYEDTTIDRKRYTSTKEVLD
ATLIHQSITGLYETRIDLSQLGGD.

[0035] In any of the above aspects, or embodiments thereof, the cytidine deaminase is an APOBEC or a variant thereof. In any of the above aspects, or embodiments thereof, the cytidine deaminase contains the amino acid sequence: MSSETGPVAVDPTLRRRIEPHEFEVFFDPRELRKETCLLYEINWGGRHSIWRHTSQNTNKHVEV NFIEKFTTERYFCPNTRCSITWFLSWSPCGECSRAITEFLSRYPHVTLFIYIARLYHHADPRNR QGLRDLISSGVTIQIMTEQESGYCWRNFVNYSPSNEAHWPRYPHLWVRLYVLELYCIILGLPPC LNILRRKQPQLTFFTIALQSCHYQRLPPHILWATGLK (SEQ ID NO: 15; BE4 cytidine deaminase domain), or a version of the amino acid sequence omitting the first methionine (M).

[0036] In any of the above aspects, or embodiments thereof, the base editor further contains one or more uracil glycosylase inhibitors (UGIs).

[0037] In any of the above aspects, or embodiments thereof, the base editor further contains one or more nuclear localization signals (NLS). In embodiments, the NLS is a bipartite NLS.

[0038] In any of the above aspects, or embodiments thereof, the guide RNA contains a CRISPR RNA (crRNA) and a trans-encoded small RNA (tracrRNA). The crRNA contains a nucleic acid sequence complementary to the TTR polynucleotide sequence.

[0039] In any of the above aspects, or embodiments thereof, the base editor is in complex or forms a complex with a single guide RNA (sgRNA) containing a nucleic acid sequence complementary to the TTR polynucleotide sequence.

[0040] In any of the above aspects, or embodiments thereof, the method further involves altering two or more nucleobases. In any of the above aspects, or embodiments thereof, the method further involves contacting the polynucleotide sequence with two or more distinct guide RNAs that target the TTR polynucleotide sequence.

[0041] In any of the above aspects, or embodiments thereof, the guide RNA(s) contains a nucleotide sequence selected from one or more of those sequences listed in Table 1, Table 2A, or Table 2B; or any of the aforementioned sequences where 1, 2, 3, 4, or 5 nucleotides is deleted from the 5′ and/or 3′ terminus of the nucleotide sequence.

[0042] In any of the above aspects, or embodiments thereof, the guide RNA(s) contains a nucleotide sequence selected from one or more of:

(SEQ ID NO: 408; sgRNA_361/gRNA1598)
5′-UAUAGGAAAACCAGUGAGUC-3′;
(SEQ ID NO: 409; sgRNA_362/gRNA1599)
5′-UACUCACCUCUGCAUGCUCA-3′;
(SEQ ID NO: 410; sgRNA_363/gRNA1606)
5′-ACUCACCUCUGCAUGCUCAU-3′;
(SEQ ID NO: 412; sgRNA_365)
5′-AUACUCACCUCUGCAUGCUCA-3′;
(SEQ ID NO: 414; sgRNA_367/gRNA-#19)
5′-UUGGCAGGAUGGCUUCUCAUCG-3′;
(SEQ ID NO: 422; sgRNA_375)
5′-GGCUAUCGUCACCAAUCCCA-3′;
(SEQ ID NO: 423; sgRNA_376)
5′-GCUAUCGUCACCAAUCCCAA-3′;
(SEQ ID NO: 561; gRNA1604)
5′-ACACCUUAUAGGAAAACCAG-3′;
(SEQ ID NO: 554; gRNA1597)
5′-CUCUCAUAGGUGGUAUUCAC-3′;
(SEQ ID NO: 557; gRNA1600)
5′-GCAACUUACCCAGAGGCAAA-3′;
(SEQ ID NO: 551; gRNA1594)
5′-CAACUUACCCAGAGGCAAAU-3′;
(SEQ ID NO: 558; gRNA1601)
5′-UCUGUAUACUCACCUCUGCA-3′;
(SEQ ID NO: 462; gRNA1756)
5′-CAAAUAUGAACCUUGUCUAG-3′;
(SEQ ID NO: 470; gRNA1764)
5′-GAACCUUGUCUAGAGAGAUU-3′;
(SEQ ID NO: 492; gRNA1786)
5′-UGAGUAUAAAAGCCCCAGGC-3′;
and
(SEQ ID NO: 478; gRNA1772)
5′-GCCAUCCUGCCAAGAAUGAG-3′;

or any of the aforementioned sequences where 1, 2, 3, 4, or 5 nucleotides is deleted from the 5′ and/or 3′ terminus of the nucleotide sequence.

[0043] In any of the above aspects, or embodiments thereof, the guide RNA(s) contains a nucleotide sequence selected from one or more of:

(SEQ ID NO: 409; sgRNA_362/gRNA1599)
5′-UACUCACCUCUGCAUGCUCA-3′,
(SEQ ID NO: 410; sgRNA_363/gRNA1606)
5′-ACUCACCUCUGCAUGCUCAU-3′,
(SEQ ID NO: 411; sgRNA_364)
5′-UACCACCUAUGAGAGAAGAC-3′,
(SEQ ID NO: 412; sgRNA_365)
5′-AUACUCACCUCUGCAUGCUCA-3′,
(SEQ ID NO: 413; sgRNA_366)
5′-ACUGGUUUUCCUAUAAGGUGU-3′,
(SEQ ID NO: 551; gRNA1594)
5′-CAACUUACCCAGAGGCAAAU-3′,
and
(SEQ ID NO: 496; gRNA1790)
5′-UGUUGACUAAGUCAAUAAUC-3′;

or any of the aforementioned sequences where 1, 2, 3, 4, or 5 nucleotides is deleted from the 5′ and/or 3′ terminus of the nucleotide sequence.

[0044] In any of the above aspects, or embodiments thereof, the guide RNA contains a nucleotide sequence, selected from one or more of:

(SEQ ID NO: 415; sgRNA_368)
5′-UCCUAUAAGGUGUGAAAGUCUG-3′,
(SEQ ID NO: 416; sgRNA_369)
5′-UGAGCCCAUGCAGCUCUCCAGA-3′,
(SEQ ID NO: 417; sgRNA_370)
5′-CUCCUCAGUUGUGAGCCCAUGC-3′,
(SEQ ID NO: 418; sgRNA_371)
5′-GUAGAAGGGAUAUACAAAGUGG-3′,
(SEQ ID NO: 419; sgRNA_372)
5′-CCACUUUGUAUAUCCCUUCUAC-3′,
(SEQ ID NO: 420; sgRNA_373)
5′-GGUGUCUAUUUCCACUUUGUAU-3′,
and
(SEQ ID NO: 421; sgRNA_374)
5′-CAUGAGCAUGCAGAGGUGAGUA-3′;

or any of the aforementioned sequences where 1, 2, 3, 4, or 5 nucleotides is deleted from the 5′ and/or 3′ terminus of the nucleotide sequence.

[0045] In any of the above aspects, or embodiments thereof, the guide RNA(s) contains 2-5 contiguous 2′-O-methylated nucleobases at the 3′ end and at the 5′ end. In any of the above aspects, or embodiments thereof, the guide RNA(s) contains 2-5 contiguous nucleobases at the 3′ end and at the 5′ end that contain phosphorothioate internucleotide linkages.

[0046] In any of the above aspects, or embodiments thereof, the Cas12b polypeptide is a bhCAS12b polypeptide. In any of the above aspects, or embodiments thereof, the bhCAS12b polypeptide contains the amino acid sequence:

bhCas12b
(SEQ ID NO: 450)
v4MAPKKKRKVGIHGVPAAATRSFILKIEPNEEVKKGLWKTHEVLNHGIAYYMNILKLIRQEAI
YEHHEQDPKNPKKVSKAEIQAELWDFVLKMQKCNSFTHEVDKDEVENILRELYEELVPSSVEKK
GEANQLSNKFLYPLVDPNSQSGKGTASSGRKPRWYNIKIAGDPSWEEEKKKWEEDKKKDPLAKI
LGKLAEYGLIPLFIPYTDSNEPIVKEIKWMEKSRNQSVRRLDKDMFIQALERFLSWESWNLKVK
EEYEKVEKEYKTLEERIKEDIQALKALEQYEKERQEQLLRDTLNTNEYRLSKRGLRGWREIIQK
WLKMDENEPSEKYLEVFKDYQRKHPREAGDYSVYEFLSKKENHFIWRNHPEYPYLYATFCEIDK
KKKDAKQQATFTLADPINHPLWVRFEERSGSNLNKYRILTEQLHTEKLKKKLTVQLDRLIYPTE
SGGWEEKGKVDIVLLPSRQFYNQIFLDIEEKGKHAFTYKDESIKFPLKGTLGGARVQFDRDHLR
RYPHKVESGNVGRIYFNMTVNIEPTESPVSKSLKIHRDDFPKVVNFKPKELTEWIKDSKGKKLK
SGIESLEIGLRVMSIDLGQRQAAAASIFEVVDQKPDIEGKLFFPIKGTELYAVHRASENIKLPG
ETLVKSREVLRKAREDNLKLMNQKLNFLRNVLHFQQFEDITEREKRVTKWISRQENSDVPLVYQ
DELIQIRELMYKPYKDWVAFLKQLHKRLEVEIGKEVKHWRKSLSDGRKGLYGISLKNIDEIDRT
RKFLLRWSLRPTEPGEVRRLEPGQRFAIDQLNHLNALKEDRLKKMANTIIMHALGYCYDVRKKK
WQAKNPACQIILFEDLSNYNPYGERSRFENSRLMKWSRREIPRQVALQGEIYGLQVGEVGAQFS
SRFHAKTGSPGIRCRVVTKEKLQDNRFFKNLQREGRLTLDKIAVLKEGDLYPDKGGEKFISLSK
DRKCVTTHADINAAQNLQKRFWTRTHGFYKVYCKAYQVDGQTVYIPESKDQKQKIIEEFGEGYF
ILKDGVYEWVNAGKLKIKKGSSKQSSSELVDSDILKDSFDLASELKGEKLMLYRDPSGNVFPSD
KWMAAGVFFGKLERILISKLTNQYSISTIEDDSSKQSMSGGSKRTADGSEFESPKKKRKVE.

[0047] In any of the above aspects, or embodiments thereof, the contacting is in a mammalian cell. In any of the above aspects, or embodiments thereof, the cell is a primate cell. In embodiments, primate cell is a human cell or a Macaca fascicularis cell. In any of the above aspects, or embodiments thereof, the cell is a liver cell. In embodiments, the liver cell is a primate liver cell in vivo. In embodiments, the primate cell is a human cell or a Macaca fascicularis cell.

[0048] In any of the above aspects, or embodiments thereof, repair of the double-stranded break by the cell results in the introduction of an indel mutation in the TTR polynucleotide sequence.

[0049] In any of the above aspects, or embodiments thereof, the method further involves contacting the polynucleotide sequence with two or more distinct guide RNAs that target the TTR polynucleotide sequence.

[0050] In any of the above aspects, or embodiments thereof, the deaminase is in complex with the polynucleotide programmable DNA binding polypeptide and the guide RNA. In any of the above aspects, or embodiments thereof, the base editor is a fusion protein containing the polynucleotide programmable DNA binding polypeptide and the deaminase.

[0051] In any of the above aspects, or embodiments thereof, the alteration of the nucleobase replaces a pathogenic alteration with a non-pathogenic alteration or a wild-type amino acid.

[0052] In any of the above aspects, or embodiments thereof, the subject is a primate. In embodiments, the primate is a human. In any of the above aspects, or embodiments thereof, the subject is a mammal. In embodiments, the primate is a human or Macaca fascicularis.

[0053] In any of the above aspects, or embodiments thereof, the polynucleotide sequence is in a hepatocyte. In embodiments, the hepatocyte is a primary hepatocyte. In embodiments, the hepatocyte is a primary cyno hepatocyte.

[0054] In any of the above aspects, or embodiments thereof, the adenosine deaminase domain contains an arginine (R) or a threonine (T) at amino acid position 147 of the following amino acid sequence, and the adenosine deaminase domain has at least about 85% sequence identity to the following amino acid sequence: MSEVEFSHEYWMRHALTLAKRARDEREVPVGAVLVLNNRVIGEGWNRAIGLHDPTAHAEIMALR QGGLVMQNYRLIDATLYVTFEPCVMCAGAMIHSRIGRVVFGVRNAKTGAAGSLMDVLHYPGMNH RVEITEGILADECAALLCYFFRMPRQVFNAQKKAQSSTD (SEQ ID NO: 4; TadA*7.10). The guide RNA targets the fusion protein to effect an alteration of a nucleobase of a TTR polynucleotide sequence.

[0055] In any of the above aspects, or embodiments thereof, the cytidine deaminase domain contains an amino acid sequence with at least about 85% sequence identity to the amino acid sequence: MSSETGPVAVDPTLRRRIEPHEFEVFFDPRELRKETCLLYEINWGGRHSIWRHTSQNTNKHVEV NFIEKFTTERYFCPNTRCSITWFLSWSPCGECSRAITEFLSRYPHVTLFIYIARLYHHADPRNR QGLRDLISSGVTIQIMTEQESGYCWRNFVNYSPSNEAHWPRYPHLWVRLYVLELYCIILGLPPC LNILRRKQPQLTFFTIALQSCHYQRLPPHILWATGLK (SEQ ID NO: 15), where the guide RNA targets the fusion protein to effect an alteration of a nucleobase of a TTR polynucleotide sequence.

[0056] In any of the above aspects, or embodiments thereof, the base editor does not contain a uracil glycosylase inhibitor (UGI).

[0057] In any of the above aspects, or embodiments thereof, the fusion protein:
[0058] (i) contains an amino acid sequence that is at least 80%, 85%, 90%, 95%, 96%, 97%, 98%, 99%, or 100% identical to:

ABE8.8
(SEQ ID NO: 442)
MSEVEFSHEYWMRHALTLAKRARDEREVPVGAVLVLNNRVIGEGWNRAIGLHDPTAHAEIMALR
QGGLVMQNYRLIDATLYVTFEPCVMCAGAMIHSRIGRVVFGVRNAKTGAAGSLMDVLHHPGMNH
RVEITEGILADECAALLCRFFRMPRRVENAQKKAQSSTDSGGSSGGSSGSETPGTSESATPESS
GGSSGGSDKKYSIGLAIGTNSVGWAVITDEYKVPSKKFKVLGNTDRHSIKKNLIGALLEDSGET
AEATRLKRTARRRYTRRKNRICYLQEIFSNEMAKVDDSFFHRLEESFLVEEDKKHERHPIFGNI
VDEVAYHEKYPTIYHLRKKLVDSTDKADLRLIYLALAHMIKERGHFLIEGDLNPDNSDVDKLFI
QLVQTYNQLFEENPINASGVDAKAILSARLSKSRRLENLIAQLPGEKKNGLFGNLIALSLGLTP
NFKSNFDLAEDAKLQLSKDTYDDDLDNLLAQIGDQYADLFLAAKNLSDAILLSDILRVNTEITK
APLSASMIKRYDEHHQDLTLLKALVRQQLPEKYKEIFFDQSKNGYAGYIDGGASQEEFYKFIKP
ILEKMDGTEELLVKLNREDLLRKQRTFDNGSIPHQIHLGELHAILRRQEDFYPELKDNREKIEK
ILTFRIPYYVGPLARGNSRFAWMTRKSEETITPWNFEEVVDKGASAQSFIERMTNEDKNLPNEK
VLPKHSLLYEYFTVYNELTKVKYVTEGMRKPAFLSGEQKKAIVDLLFKTNRKVTVKQLKEDYFK
KIECFDSVEISGVEDRFNASLGTYHDLLKIIKDKDELDNEENEDILEDIVLTLTLFEDREMIEE
RLKTYAHLFDDKVMKQLKRRRYTGWGRLSRKLINGIRDKQSGKTILDFLKSDGFANRNFMQLIH
DDSLTFKEDIQKAQVSGQGDSLHEHIANLAGSPAIKKGILQTVKVVDELVKVMGRHKPENIVIE
MARENQTTQKGQKNSRERMKRIEEGIKELGSQILKEHPVENTQLQNEKLYLYYLQNGRDMYVDQ
ELDINRLSDYDVDHIVPQSFLKDDSIDNKVLTRSDKNRGKSDNVPSEEVVKKMKNYWRQLLNAK
LITQRKFDNLTKAERGGLSELDKAGFIKRQLVETRQITKHVAQILDSRMNTKYDENDKLIREVK
VITLKSKLVSDFRKDFQFYKVREINNYHHAHDAYLNAVVGTALIKKYPKLESEFVYGDYKVYDV
RKMIAKSEQEIGKATAKYFFYSNIMNFFKTEITLANGEIRKRPLIETNGETGEIVWDKGRDFAT
VRKVLSMPQVNIVKKTEVQTGGFSKESILPKRNSDKLIARKKDWDPKKYGGFDSPTVAYSVLVV
AKVEKGKSKKLKSVKELLGITIMERSSFEKNPIDFLEAKGYKEVKKDLIIKLPKYSLFELENGR
KRMLASAGELQKGNELALPSKYVNFLYLASHYEKLKGSPEDNEQKQLFVEQHKHYLDEIIEQIS
EFSKRVILADANLDKVLSAYNKHRDKPIREQAENIIHLFTLTNLGAPAAFKYFDTTIDRKRYTS
TKEVLDATLIHQSITGLYETRIDLSQLGGDEGADKRTADGSEFESPKKKRKV;

[0059] (ii) contains an amino acid sequence that is at least 80%, 85%, 90%, 95%, 96%, 97%, 98%, 99%, or 100% identical to:

BE4
(SEQ ID NO: 443)
MSSETGPVAVDPTLRRRIEPHEFEVFFDPRELRKETCLLYEINWGGRHSIWRHTSQNTNKHVEV
NFIEKFTTERYFCPNTRCSITWELSWSPCGECSRAITEFLSRYPHVTLFIYIARLYHHADPRNR
QGLRDLISSGVTIQIMTEQESGYCWRNFVNYSPSNEAHWPRYPHLWVRLYVLELYCIILGLPPC
LNILRRKQPQLTFFTIALQSCHYQRLPPHILWATGLKSGGSSGGSSGSETPGTSESATPESSGG
SSGGSDKKYSIGLAIGTNSVGWAVITDEYKVPSKKFKVLGNTDRHSIKKNLIGALLEDSGETAE
ATRLKRTARRRYTRRKNRICYLQEIFSNEMAKVDDSFFHRLEESFLVEEDKKHERHPIFGNIVD
EVAYHEKYPTIYHLRKKLVDSTDKADLRLIYLALAHMIKERGHFLIEGDLNPDNSDVDKLFIQL
VQTYNQLFEENPINASGVDAKAILSARLSKSRRLENLIAQLPGEKKNGLFGNLIALSLGLTPNF
KSNFDLAEDAKLQLSKDTYDDDLDNLLAQIGDQYADLFLAAKNLSDAILLSDILRVNTEITKAP
LSASMIKRYDEHHQDLTLLKALVRQQLPEKYKEIFFDQSKNGYAGYIDGGASQEEFYKFIKPIL
EKMDGTEELLVKLNREDLLRKQRTFDNGSIPHQIHLGELHAILRRQEDFYPFLKDNREKIEKIL
TFRIPYYVGPLARGNSRFAWMTRKSEETITPWNFEEVVDKGASAQSFIERMTNEDKNLPNEKVL
PKHSLLYEYFTVYNELTKVKYVTEGMRKPAFLSGEQKKAIVDLLFKTNRKVTVKQLKEDYFKKI
ECFDSVEISGVEDRENASLGTYHDLLKIIKDKDELDNEENEDILEDIVLTLTLFEDREMIEERL
KTYAHLFDDKVMKQLKRRRYTGWGRLSRKLINGIRDKQSGKTILDFLKSDGFANRNFMQLIHDD
SLTFKEDIQKAQVSGQGDSLHEHIANLAGSPAIKKGILQTVKVVDELVKVMGRHKPENIVIEMA
RENQTTQKGQKNSRERMKRIEEGIKELGSQILKEHPVENTQLQNEKLYLYYLQNGRDMYVDQEL
DINRLSDYDVDHIVPQSFLKDDSIDNKVLTRSDKNRGKSDNVPSEEVVKKMKNYWRQLLNAKLI
TQRKFDNLTKAERGGLSELDKAGFIKRQLVETRQITKHVAQILDSRMNTKYDENDKLIREVKVI
TLKSKLVSDFRKDFQFYKVREINNYHHAHDAYLNAVVGTALIKKYPKLESEFVYGDYKVYDVRK
MIAKSEQEIGKATAKYFFYSNIMNFFKTEITLANGEIRKRPLIETNGETGEIVWDKGRDFATVR
KVLSMPQVNIVKKTEVQTGGESKESILPKRNSDKLIARKKDWDPKKYGGFDSPTVAYSVLVVAK
VEKGKSKKLKSVKELLGITIMERSSFEKNPIDFLEAKGYKEVKKDLIIKLPKYSLFELENGRKR
MLASAGELQKGNELALPSKYVNFLYLASHYEKLKGSPEDNEQKQLFVEQHKHYLDEIIEQISEF
SKRVILADANLDKVLSAYNKHRDKPIREQAENIIHLFTLTNLGAPAAFKYEDTTIDRKRYTSTK
EVLDATLIHQSITGLYETRIDLSQLGGDSGGSGGSGGSTNLSDIIEKETGKQLVIQESILMLPE
EVEEVIGNKPESDILVHTAYDESTDENVMLLTSDAPEYKPWALVIQDSNGENKIKMLSGGSGGS
GGSTNLSDIIEKETGKQLVIQESILMLPEEVEEVIGNKPESDILVHTAYDESTDENVMLLTSDA
PEYKPWALVIQDSNGENKIKMLSGGSKRTADGSEFESPKKKRKVE;

[0060] (iii) contains an amino acid sequence that is at least 80%, 85%, 90%, 95%, 96%, 97%, 98%, 99%, or 100% identical to:

ABE8.8-VRQR
(SEQ ID NO: 444)
MSEVEFSHEYWMRHALTLAKRARDEREVPVGAVLVLNNRVIGEGWNRAIGLHDPTAHAEIMALR
QGGLVMQNYRLIDATLYVTFEPCVMCAGAMIHSRIGRVVFGVRNAKTGAAGSLMDVLHHPGMNH
RVEITEGILADECAALLCRFFRMPRRVENAQKKAQSSTDSGGSSGGSSGSETPGTSESATPESS
GGSSGGSDKKYSIGLAIGTNSVGWAVITDEYKVPSKKFKVLGNTDRHSIKKNLIGALLEDSGET
AEATRLKRTARRRYTRRKNRICYLQEIFSNEMAKVDDSFFHRLEESFLVEEDKKHERHPIFGNI
VDEVAYHEKYPTIYHLRKKLVDSTDKADLRLIYLALAHMIKFRGHFLIEGDLNPDNSDVDKLFI
QLVQTYNQLFEENPINASGVDAKAILSARLSKSRRLENLIAQLPGEKKNGLFGNLIALSLGLTP
NFKSNFDLAEDAKLQLSKDTYDDDLDNLLAQIGDQYADLFLAAKNLSDAILLSDILRVNTEITK
APLSASMIKRYDEHHQDLTLLKALVRQQLPEKYKEIFFDQSKNGYAGYIDGGASQEEFYKFIKP
ILEKMDGTEELLVKLNREDLLRKQRTFDNGSIPHQIHLGELHAILRRQEDFYPFLKDNREKIEK
ILTFRIPYYVGPLARGNSRFAWMTRKSEETITPWNFEEVVDKGASAQSFIERMTNFDKNLPNEK
VLPKHSLLYEYFTVYNELTKVKYVTEGMRKPAFLSGEQKKAIVDLLFKTNRKVTVKQLKEDYFK
KIECFDSVEISGVEDRFNASLGTYHDLLKIIKDKDFLDNEENEDILEDIVLTLTLFEDREMIEE
RLKTYAHLFDDKVMKQLKRRRYTGWGRLSRKLINGIRDKQSGKTILDFLKSDGFANRNFMQLIH
DDSLTFKEDIQKAQVSGQGDSLHEHIANLAGSPAIKKGILQTVKVVDELVKVMGRHKPENIVIE
MARENQTTQKGQKNSRERMKRIEEGIKELGSQILKEHPVENTQLQNEKLYLYYLQNGRDMYVDQ
ELDINRLSDYDVDHIVPQSFLKDDSIDNKVLTRSDKNRGKSDNVPSEEVVKKMKNYWRQLLNAK
LITQRKFDNLTKAERGGLSELDKAGFIKRQLVETRQITKHVAQILDSRMNTKYDENDKLIREVK
VITLKSKLVSDFRKDFQFYKVREINNYHHAHDAYLNAVVGTALIKKYPKLESEFVYGDYKVYDV
RKMIAKSEQEIGKATAKYFFYSNIMNFFKTEITLANGEIRKRPLIETNGETGEIVWDKGRDFAT
VRKVLSMPQVNIVKKTEVQTGGFSKESILPKRNSDKLIARKKDWDPKKYGGFVSPTVAYSVLVV
AKVEKGKSKKLKSVKELLGITIMERSSFEKNPIDFLEAKGYKEVKKDLIIKLPKYSLFELENGR
KRMLASARELQKGNELALPSKYVNFLYLASHYEKLKGSPEDNEQKQLFVEQHKHYLDEIIEQIS
EFSKRVILADANLDKVLSAYNKHRDKPIREQAENIIHLFTLTNLGAPAAFKYEDTTIDRKQYRS
TKEVLDATLIHQSITGLYETRIDLSQLGGDEGADKRTADGSEFESPKKKRKV;

[0061] (iv) contains an amino acid sequence that is at least 80%, 85%, 90%, 95%, 96%, 97%, 98%, 99%, or 100% identical to:

BE4-VRQR
(SEQ ID NO: 445)
MSSETGPVAVDPTLRRRIEPHEFEVFFDPRELRKETCLLYEINWGGRHSIWRHTSQNTNKHVEV
NFIEKFTTERYFCPNTRCSITWFLSWSPCGECSRAITEFLSRYPHVTLFIYIARLYHHADPRNR
QGLRDLISSGVTIQIMTEQESGYCWRNFVNYSPSNEAHWPRYPHLWVRLYVLELYCIILGLPPC
LNILRRKQPQLTFFTIALQSCHYQRLPPHILWATGLKSGGSSGGSSGSETPGTSESATPESSGG
SSGGSDKKYSIGLAIGTNSVGWAVITDEYKVPSKKFKVLGNTDRHSIKKNLIGALLFDSGETAE
ATRLKRTARRRYTRRKNRICYLQEIFSNEMAKVDDSFFHRLEESFLVEEDKKHERHPIFGNIVD
EVAYHEKYPTIYHLRKKLVDSTDKADLRLIYLALAHMIKFRGHFLIEGDLNPDNSDVDKLFIQL
VQTYNQLFEENPINASGVDAKAILSARLSKSRRLENLIAQLPGEKKNGLFGNLIALSLGLTPNF
KSNFDLAEDAKLQLSKDTYDDDLDNLLAQIGDQYADLFLAAKNLSDAILLSDILRVNTEITKAP
LSASMIKRYDEHHQDLTLLKALVRQQLPEKYKEIFFDQSKNGYAGYIDGGASQEEFYKFIKPIL
EKMDGTEELLVKLNREDLLRKQRTFDNGSIPHQIHLGELHAILRRQEDFYPFLKDNREKIEKIL
TFRIPYYVGPLARGNSRFAWMTRKSEETITPWNFEEVVDKGASAQSFIERMTNEDKNLPNEKVL
PKHSLLYEYFTVYNELTKVKYVTEGMRKPAFLSGEQKKAIVDLLFKTNRKVTVKQLKEDYFKKI
ECFDSVEISGVEDRENASLGTYHDLLKIIKDKDELDNEENEDILEDIVLTLTLFEDREMIEERL
KTYAHLFDDKVMKQLKRRRYTGWGRLSRKLINGIRDKQSGKTILDFLKSDGFANRNFMQLIHDD
SLTFKEDIQKAQVSGQGDSLHEHIANLAGSPAIKKGILQTVKVVDELVKVMGRHKPENIVIEMA
RENQTTQKGQKNSRERMKRIEEGIKELGSQILKEHPVENTQLQNEKLYLYYLQNGRDMYVDQEL
DINRLSDYDVDHIVPQSFLKDDSIDNKVLTRSDKNRGKSDNVPSEEVVKKMKNYWRQLLNAKLI
TQRKFDNLTKAERGGLSELDKAGFIKRQLVETRQITKHVAQILDSRMNTKYDENDKLIREVKVI
TLKSKLVSDFRKDFQFYKVREINNYHHAHDAYLNAVVGTALIKKYPKLESEFVYGDYKVYDVRK
MIAKSEQEIGKATAKYFFYSNIMNFFKTEITLANGEIRKRPLIETNGETGEIVWDKGRDFATVR
KVLSMPQVNIVKKTEVQTGGFSKESILPKRNSDKLIARKKDWDPKKYGGFVSPTVAYSVLVVAK
VEKGKSKKLKSVKELLGITIMERSSFEKNPIDFLEAKGYKEVKKDLIIKLPKYSLFELENGRKR
MLASARELQKGNELALPSKYVNFLYLASHYEKLKGSPEDNEQKQLFVEQHKHYLDEIIEQISEF
SKRVILADANLDKVLSAYNKHRDKPIREQAENIIHLFTLTNLGAPAAFKYEDTTIDRKQYRSTK
EVLDATLIHQSITGLYETRIDLSQLGGDSGGSGGSGGSTNLSDIIEKETGKQLVIQESILMLPE
EVEEVIGNKPESDILVHTAYDESTDENVMLLTSDAPEYKPWALVIQDSNGENKIKMLSGGSGGS
GGSTNLSDIIEKETGKQLVIQESILMLPEEVEEVIGNKPESDILVHTAYDESTDENVMLLTSDA
PEYKPWALVIQDSNGENKIKMLSGGSKRTADGSEFESPKKKRKVE;

[0062] (v) contains an amino acid sequence that is at least 80%, 85%, 90%, 95%, 96%, 97%, 98%, 99%, or 100% identical to:

saABE8.8
(SEQ ID NO: 446)
MSEVEFSHEYWMRHALTLAKRARDEREVPVGAVLVLNNRVIGEGWNRAIGLHDPTAHAEIMALR
QGGLVMQNYRLIDATLYVTFEPCVMCAGAMIHSRIGRVVFGVRNAKTGAAGSLMDVLHHPGMNH
RVEITEGILADECAALLCRFERMPRRVENAQKKAQSSTDSGGSSGGSSGSETPGTSESATPESS
GGSSGGSKRNYILGLAIGITSVGYGIIDYETRDVIDAGVRLFKEANVENNEGRRSKRGARRLKR
RRRHRIQRVKKLLFDYNLLTDHSELSGINPYEARVKGLSQKLSEEEFSAALLHLAKRRGVHNVN
EVEEDTGNELSTKEQISRNSKALEEKYVAELQLERLKKDGEVRGSINRFKTSDYVKEAKQLLKV
QKAYHQLDQSFIDTYIDLLETRRTYYEGPGEGSPFGWKDIKEWYEMLMGHCTYFPEELRSVKYA
YNADLYNALNDLNNLVITRDENEKLEYYEKFQIIENVFKQKKKPTLKQIAKEILVNEEDIKGYR
VTSTGKPEFTNLKVYHDIKDITARKEIIENAELLDQIAKILTIYQSSEDIQEELTNLNSELTQE
EIEQISNLKGYTGTHNLSLKAINLILDELWHTNDNQIAIFNRLKLVPKKVDLSQQKEIPTTLVD
DFILSPVVKRSFIQSIKVINAIIKKYGLPNDIIIELAREKNSKDAQKMINEMQKRNRQTNERIE
EIIRTTGKENAKYLIEKIKLHDMQEGKCLYSLEAIPLEDLLNNPFNYEVDHIIPRSVSEDNSEN
NKVLVKQEENSKKGNRTPFQYLSSSDSKISYETFKKHILNLAKGKGRISKTKKEYLLEERDINR
FSVQKDFINRNLVDTRYATRGLMNLLRSYFRVNNLDVKVKSINGGFTSFLRRKWKFKKERNKGY
KHHAEDALIIANADFIFKEWKKLDKAKKVMENQMFEEKQAESMPEIETEQEYKEIFITPHQIKH
IKDFKDYKYSHRVDKKPNRELINDTLYSTRKDDKGNTLIVNNLNGLYDKDNDKLKKLINKSPEK
LLMYHHDPQTYQKLKLIMEQYGDEKNPLYKYYEETGNYLTKYSKKDNGPVIKKIKYYGNKLNAH
LDITDDYPNSRNKVVKLSLKPYRFDVYLDNGVYKFVTVKNLDVIKKENYYEVNSKCYEEAKKLK
KISNQAEFIASFYNNDLIKINGELYRVIGVNNDLLNRIEVNMIDITYREYLENMNDKRPPRIIK
TIASKTQSIKKYSTDILGNLYEVKSKKHPQIIKKGEGADKRTADGSEFESPKKKRKV;

[0063] (vi) contains an amino acid sequence that is at least 80%, 85%, 90%, 95%, 96%, 97%, 98%, 99%, or 100% identical to:

saBE4
(SEQ ID NO: 447)
MSSETGPVAVDPTLRRRIEPHEFEVFFDPRELRKETCLLYEINWGGRHSIWRHTSQNTNKHVEV
NFIEKFTTERYFCPNTRCSITWFLSWSPCGECSRAITEFLSRYPHVTLFIYIARLYHHADPRNR
QGLRDLISSGVTIQIMTEQESGYCWRNFVNYSPSNEAHWPRYPHLWVRLYVLELYCIILGLPPC
LNILRRKQPQLTFFTIALQSCHYQRLPPHILWATGLKSGGSSGGSSGSETPGTSESATPESSGG
SSGGSGKRNYILGLAIGITSVGYGIIDYETRDVIDAGVRLFKEANVENNEGRRSKRGARRLKRR
RRHRIQRVKKLLFDYNLLTDHSELSGINPYEARVKGLSQKLSEEEFSAALLHLAKRRGVHNVNE
VEEDTGNELSTKEQISRNSKALEEKYVAELQLERLKKDGEVRGSINRFKTSDYVKEAKQLLKVQ
KAYHQLDQSFIDTYIDLLETRRTYYEGPGEGSPFGWKDIKEWYEMLMGHCTYFPEELRSVKYAY
NADLYNALNDLNNLVITRDENEKLEYYEKFQIIENVFKQKKKPTLKQIAKEILVNEEDIKGYRV
TSTGKPEFTNLKVYHDIKDITARKEIIENAELLDQIAKILTIYQSSEDIQEELTNLNSELTQEE
IEQISNLKGYTGTHNLSLKAINLILDELWHTNDNQIAIFNRLKLVPKKVDLSQQKEIPTTLVDD
FILSPVVKRSFIQSIKVINAIIKKYGLPNDIIIELAREKNSKDAQKMINEMQKRNRQTNERIEE
IIRTTGKENAKYLIEKIKLHDMQEGKCLYSLEAIPLEDLLNNPFNYEVDHIIPRSVSEDNSENN
KVLVKQEENSKKGNRTPFQYLSSSDSKISYETFKKHILNLAKGKGRISKTKKEYLLEERDINRF
SVQKDFINRNLVDTRYATRGLMNLLRSYFRVNNLDVKVKSINGGFTSFLRRKWKFKKERNKGYK
HHAEDALIIANADFIFKEWKKLDKAKKVMENQMFEEKQAESMPEIETEQEYKEIFITPHQIKHI
KDFKDYKYSHRVDKKPNRELINDTLYSTRKDDKGNTLIVNNLNGLYDKDNDKLKKLINKSPEKL
LMYHHDPQTYQKLKLIMEQYGDEKNPLYKYYEETGNYLTKYSKKDNGPVIKKIKYYGNKLNAHL
DITDDYPNSRNKVVKLSLKPYRFDVYLDNGVYKFVTVKNLDVIKKENYYEVNSKCYEEAKKLKK
ISNQAEFIASFYNNDLIKINGELYRVIGVNNDLLNRIEVNMIDITYREYLENMNDKRPPRIIKT
IASKTQSIKKYSTDILGNLYEVKSKKHPQIIKKGGSPKKKRKVSSDYKDHDGDYKDHDIDYKDD
DDKSGGSGGSGGSTNLSDIIEKETGKQLVIQESILMLPEEVEEVIGNKPESDILVHTAYDESTD
ENVMLLTSDAPEYKPWALVIQDSNGENKIKMLSGGSGGSGGSTNLSDIIEKETGKQLVIQESIL
MLPEEVEEVIGNKPESDILVHTAYDESTDENVMLLTSDAPEYKPWALVIQDSNGENKIKMLSGG
SKRTADGSEFESPKKKRKVE;

[0064] (vii) contains an amino acid sequence that is at least 80%, 85%, 90%, 95%, 96%, 97%, 98%, 99%, or 100% identical to:

saBE4-KKH
(SEQ ID NO: 448)
MSSETGPVAVDPTLRRRIEPHEFEVFFDPRELRKETCLLYEINWGGRHSIWRHTSQNTNKHVEV
NFIEKFTTERYFCPNTRCSITWFLSWSPCGECSRAITEFLSRYPHVTLFIYIARLYHHADPRNR
QGLRDLISSGVTIQIMTEQESGYCWRNFVNYSPSNEAHWPRYPHLWVRLYVLELYCIILGLPPC
LNILRRKQPQLTFFTIALQSCHYQRLPPHILWATGLKSGGSSGGSSGSETPGTSESATPESSGG
SSGGSGKRNYILGLAIGITSVGYGIIDYETRDVIDAGVRLFKEANVENNEGRRSKRGARRLKRR
RRHRIQRVKKLLFDYNLLTDHSELSGINPYEARVKGLSQKLSEEEFSAALLHLAKRRGVHNVNE
VEEDTGNELSTKEQISRNSKALEEKYVAELQLERLKKDGEVRGSINRFKTSDYVKEAKQLLKVQ
KAYHQLDQSFIDTYIDLLETRRTYYEGPGEGSPFGWKDIKEWYEMLMGHCTYFPEELRSVKYAY
NADLYNALNDLNNLVITRDENEKLEYYEKFQIIENVFKQKKKPTLKQIAKEILVNEEDIKGYRV
TSTGKPEFTNLKVYHDIKDITARKEIIENAELLDQIAKILTIYQSSEDIQEELTNLNSELTQEE
IEQISNLKGYTGTHNLSLKAINLILDELWHTNDNQIAIFNRLKLVPKKVDLSQQKEIPTTLVDD
FILSPVVKRSFIQSIKVINAIIKKYGLPNDIIIELAREKNSKDAQKMINEMQKRNRQTNERIEE
IIRTTGKENAKYLIEKIKLHDMQEGKCLYSLEAIPLEDLLNNPENYEVDHIIPRSVSEDNSENN
KVLVKQEENSKKGNRTPFQYLSSSDSKISYETFKKHILNLAKGKGRISKTKKEYLLEERDINRF
SVQKDFINRNLVDTRYATRGLMNLLRSYFRVNNLDVKVKSINGGFTSFLRRKWKFKKERNKGYK
HHAEDALIIANADFIFKEWKKLDKAKKVMENQMFEEKQAESMPEIETEQEYKEIFITPHQIKHI
KDFKDYKYSHRVDKKPNRKLINDTLYSTRKDDKGNTLIVNNLNGLYDKDNDKLKKLINKSPEKL
LMYHHDPQTYQKLKLIMEQYGDEKNPLYKYYEETGNYLTKYSKKDNGPVIKKIKYYGNKLNAHL
DITDDYPNSRNKVVKLSLKPYRFDVYLDNGVYKFVTVKNLDVIKKENYYEVNSKCYEEAKKLKK
ISNQAEFIASFYKNDLIKINGELYRVIGVNNDLLNRIEVNMIDITYREYLENMNDKRPPHIIKT
IASKTQSIKKYSTDILGNLYEVKSKKHPQIIKKGGSPKKKRKVSSDYKDHDGDYKDHDIDYKDD
DDKSGGSGGSGGSTNLSDIIEKETGKQLVIQESILMLPEEVEEVIGNKPESDILVHTAYDESTD
ENVMLLTSDAPEYKPWALVIQDSNGENKIKMLSGGSGGSGGSTNLSDIIEKETGKQLVIQESIL
MLPEEVEEVIGNKPESDILVHTAYDESTDENVMLLTSDAPEYKPWALVIQDSNGENKIKMLSGG
SKRTADGSEFESPKKKRKVE;

or
[0065] (viii) contains an amino acid sequence that is at least 80%, 85%, 90%, 95%, 96%, 97%, 98%, 99%, or 100% identical to:

ABE-bhCAS12b
(SEQ ID NO: 449)
MSEVEFSHEYWMRHALTLAKRARDEREVPVGAVLVLNNRVIGEGWNRAIGLHDPTAHAEIMALR
QGGLVMQNYRLYDATLYVTFEPCVMCAGAMIHSRIGRVVFGVRNAKTGAAGSLMDVLHHPGMNH
RVEITEGILADECAALLCRFFRMPRRVENAQKKAQSSTDGSSGSETPGTSESATPESSGAPKKK
RKVGIHGVPAAATRSFILKIEPNEEVKKGLWKTHEVLNHGIAYYMNILKLIRQEAIYEHHEQDP
KNPKKVSKAEIQAELWDFVLKMQKCNSFTHEVDKDEVENILRELYEELVPSSVEKKGEANQLSN
KFLYPLVDPNSQSGKGTASSGRKPRWYNLKIAGDPSWEEEKKKWEEDKKKDPLAKILGKLAEYG
LIPLFIPYTDSNEPIVKEIKWMEKSRNQSVRRLDKDMFIQALERFLSWESWNLKVKEEYEKVEK
EYKTLEERIKEDIQALKALEQYEKERQEQLLRDTLNTNEYRLSKRGLRGWREIIQKWLKMDENE
PSEKYLEVEKDYQRKHPREAGDYSVYEFLSKKENHFIWRNHPEYPYLYATFCEIDKKKKDAKQQ
ATFTLADPINHPLWVRFEERSGSNLNKYRILTEQLHTEKLKKKLTVQLDRLIYPTESGGWEEKG
KVDIVLLPSRQFYNQIFLDIEEKGKHAFTYKDESIKFPLKGTLGGARVQFDRDHLRRYPHKVES
GNVGRIYENMTVNIEPTESPVSKSLKIHRDDFPKVVNFKPKELTEWIKDSKGKKLKSGIESLEI
GLRVMSIALGQRQAAAASIFEVVDQKPDIEGKLFFPIKGTELYAVHRASFNIKLPGETLVKSRE
VLRKAREDNLKLMNQKLNFLRNVLHFQQFEDITEREKRVTKWISRQENSDVPLVYQDELIQIRE
LMYKPYKDWVAFLKQLHKRLEVEIGKEVKHWRKSLSDGRKGLYGISLKNIDEIDRTRKELLRWS
LRPTEPGEVRRLEPGQRFAIDQLNHLNALKEDRLKKMANTIIMHALGYCYDVRKKKWQAKNPAC
QIILFEDLSNYNPYKERSRFENSRLMKWSRREIPRQVALQGEIYGLQVGEVGAQFSSRFHAKTG
SPGIRCRVVTKEKLQDNRFFKNLQREGRLTLDKIAVLKEGDLYPDKGGEKFISLSKDRKCVTTH
ADINAAQNLQKRFWTRTHGFYKVYCKAYQVDGQTVYIPESKDQKQKIIEEFGEGYFILKDGVYE
WVNAGKLKIKKGSSKQSSSELVDSDILKDSFDLASELKGEKLMLYRDPSGNVEPSDKWMAAGVE
FGKLERILISKLTNQYSISTIEDDSSKQSMKRPAATKKAGQAKKKK.

[0066] In any of the above aspects, or embodiments thereof, the guide RNA(s) contains 15, 16, 17, 18, 19, 20, 21, 22, 23, 24, 25, 26, 27, 28, 29, or 30 contiguous nucleotides that are perfectly complementary to the TTR polynucleotide. In any of the above aspects, or embodiments thereof, the guide RNA contains a nucleic acid sequence containing 15, 16, 17, 18, 19, 20, 21, 22, 23, 24, 25, 26, 27, 28, 29, 30, 31, 32, 33, 34, 35, 36, 37, 38, 39, or 40 contiguous nucleotides that are complementary to the TTR polynucleotide sequence.

[0067] In any of the above aspects, or embodiments thereof, the composition or pharmaceutical composition further contains a lipid or lipid nanoparticle. In embodiments, the lipid is a cationic lipid. In any of the above aspects, or embodiments thereof, the guide RNA contains a nucleic acid sequence contains at least 10 contiguous nucleotides that are complementary to the TTR polynucleotide sequence.

[0068] In any of the above aspects, or embodiments thereof, the one or more polynucleotides encoding the fusion protein contains mRNA.

[0069] In any of the above aspects, or embodiments thereof, the composition or pharmaceutical composition further contains a pharmaceutically acceptable excipient. In any of the above aspects, or embodiments thereof, the gRNA and the base editor are formulated together or separately.

[0070] In any of the above aspects, or embodiments thereof, the polynucleotide is present in a vector suitable for expression in a mammalian cell. In embodiments, the vector is a viral vector. In embodiments, the viral vector is a retroviral vector, adenoviral vector, lentiviral vector, herpesvirus vector, or adeno-associated viral vector (AAV).

[0071] In any of the above aspects, or embodiments thereof, the alteration reduces or eliminates expression of a wild-type or mutant TTR polypeptide.

### Definitions

[0072] Unless defined otherwise, all technical and scientific terms used herein have the meaning commonly understood by a person skilled in the art to which this invention belongs. The following references provide one of skill with a general definition of many of the terms used in this invention: Singleton et al., Dictionary of Microbiology and Molecular Biology (2nd ed. 1994); The Cambridge Dictionary of Science and Technology (Walker ed., 1988); The Glossary of Genetics, 5th Ed., R. Rieger et al. (eds.), Springer Verlag (1991); and Hale & Marham, The Harper Collins Dictionary of Biology (1991). As used herein, the following terms have the meanings ascribed to them below, unless specified otherwise.

[0073] By “transthyretin (TTR) polypeptide” is meant a polypeptide or fragment thereof having at least about 95% amino acid sequence identity to an amino acid sequence provided at NCBI Reference Sequence No. NP_000362.1, or a fragment thereof that binds an anti-TTR antibody. In some embodiments, a TTR polypeptide or fragment thereof has holo-retinol-binding protein (RBP) and/or thyroxine (T4) transport activity. Typically, amino acid locations for mutations to the TTR polypeptide are numbered with reference to the mature TTR polypeptide (i.e., the TTR polypeptide without a signal sequence). In embodiments, TTR is capable of forming a tetramer. An exemplary TTR polypeptide sequence follows (the signal peptide sequence is in bold; therefore, the mature TTR polypeptide corresponds to amino acids 21 to 147 of the following sequence):

(SEQ ID NO: 1)
MASHRLLLLCLAGLVFVSEAGPTGTGESKCPLMVKVLDAVRGSPAINVA
VHVFRKAADDTWEPFASGKTSESGELHGLTTEEEFVEGIYKVEIDTKSY
WKALGISPFHEHAEVVFTANDSGPRRYTIAALLSPYSYSTTAVVTNPK
E.

[0074] By “transthyretin (TTR) polynucleotide” is meant a nucleic acid molecule that encodes a TTR, as well as the introns, exons, 3′ untranslated regions, 5′ untranslated regions, and regulatory sequences associated with its expression, or fragments thereof. In embodiments, the regulatory sequence is a promoter region. In embodiments, a TTR polynucleotide is the genomic sequence, cDNA, mRNA, or gene associated with and/or required for TTR expression. An exemplary TTR polynucleotide sequence (corresponding to Consensus Coding Sequence (CCDS) No. 11899.1) is provided below. Further exemplary TTR polynucleotide sequences include Gene Ensembl ID: ENSG00000118271 and Transcript Ensembl ID: ENST00000237014.8.

(SEQ ID NO: 2)
ATGGCTTCTCATCGTCTGCTCCTCCTCTGCCTTGCTGGACTGGTATTTG
TGTCTGAGGCTGGCCCTACGGGCACCGGTGAATCCAAGTGTCCTCTGAT
GGTCAAAGTTCTAGATGCTGTCCGAGGCAGTCCTGCCATCAATGTGGCC
GTGCATGTGTTCAGAAAGGCTGCTGATGACACCTGGGAGCCATTTGCCT
CTGGGAAAACCAGTGAGTCTGGAGAGCTGCATGGGCTCACAACTGAGGA
GGAATTTGTAGAAGGGATATACAAAGTGGAAATAGACACCAAATCTTAC
TGGAAGGCACTTGGCATCTCCCCATTCCATGAGCATGCAGAGGTGGTAT
TCACAGCCAACGACTCCGGCCCCCGCCGCTACACCATTGCCGCCCTGCT
GAGCCCCTACTCCTATTCCACCACGGCTGTCGTCACCAATCCCAAGGAA
TGA.

[0075] A further exemplary TTR polynucleotide sequence is provided at NCBI Reference Sequence No. NG_009490.1 and follows (where exons encoding the TTR polypeptide are in bold, introns are in italics, and exemplary promoter regions are indicated by the combined underlined and bold-underlined text (promoter positions −1 to −177) and by the bold-underlined text (promoter positions −106 to −176); further exemplary promoter regions are shown in FIGS. 9A, 9B, 12A, and 12B):

(SEQ ID NO: 3)
TTATGTGTTTATTCAACAATGGCGGAGGAGAGGCATGCCAGATAAGGCAGACACGG
GCATTCCAAACACAAGAAAGGTATGTGCTGCAGAGAAGTCAGATAACTTTCCTAGG
CTCTCCTGCAGTCCGGATGAAATACTCTCAAAAAATTAGCCCGGGCCCTTTGCTCCA
ATTTTTCGCTTACCTAGCAACCATCTAACTATTAATTAAATTGGTATTATGGTTTTAA
CATGAATCTTTTATGATTTGCTTACCATTAATCAAACCCCCGAGGCTTATTCACCTCA
AGGGGAGCTGACAAAGTTGAATTATTCAACCTGCAAAGATCCAGGGCCCCCAAATA
CTGTCATTTCCACTCTCCCCTAACCCCCACCATGAGGCCCAGTCTCAGCACTCGGCC
AGCCTATGCCCAACTCGGGGTAATCAGCTTAGACATATTAATATTAGTGGGCATTTC
AGTATCAACAGATCACTGTCTAGCAGCTGACAGGCACCCTCAGAAAATAAACCAAG
AAGAAAGGGTTTATCTATAATATCAAAATTTTTCATAGATAAACCTGCCCATTATAA
GGAAGAGGGCAGAAGAACCCTAAACTAAGAGCCAGGCAACTTGTTCATTAATCACA
GCATATTCCATAGAAGGAGGAGAAATGTTGTCATCAAATTCATCTTTTTCACCTCAA
TTAAACATCTATGCTACAGCTCCACAGTCAGATTGAGAGGAAAAACAGTACGTAGC
TAAGAAAAGACATAGACTTGTAACTGAAATGCTTCACTGGTGCTCCTTTTGTTTTAA
GGCATTGGATCTTCATAGCTACTGATCGTGCCCAAGCACACAGTATCTGCAGCAACC
ACTTAGGCCTCCAGGAATGTGGTGACCATTGACCCTAATTCATTCCCCTTCATGGAT
CCTATGTAACCATCCTCCAAAAAGAGCTTTCGCAAACTCAAATAAACACAGGAAAG
GAAGACCTTCTTATCTTTGAGAGTATATGTTTAGCCCTATAACCCTCTCTTATCATAA
ATTGCTTCTTAGGCAAGAAACACTGGATTTTTCTTGTATTTGTCATTGCCATTGGTTC
CATACAAGCATTCATTTAACAAATAATACATTCCATCTCCGTTTTTTGCTTTTTCCTT
CATGCTTCGGCCTTGGTTTTCTCTCACCTAAAACACTACAAGCTTCTTCTCCCAGAGC
TCTCACTTTGACTCCAGACTACCTACATTTAATCTTTAATTCTCTACCAAAATTTTCT
CTTATCTTTATATCTTTTTAATTTTAATTTTATTTTTTGTGGATACATAGTAGGTGTAT
ATATTTATGGGGTACATGCAATGTTTTAATACAGGCATGCAATGTGAAATAAGGACA
TCATGGAGAATGGGGTATCCATCTCCTCAAGCATTTATCTTTTCAGTTACAAACAAT
CCAATTACACTCTTTATTTTAAAATATACAATTATTAATTATAGTCACTCTGTTGTGC
TATCAAATAGTAGATCTTATTCTTTCTATTTTTTGTACCCTCTCGTCTTTTTATATTAA
AAAATAATCTTTATCTCTGTAAGCTTCATCAGTGATTTTCCAATGAAATTTAGGATCT
TCTCTATACCCTGAATTGCCTTACTTTCTCCCCACTTCCTTGTCTTATTCAAATGCAG
ATTTCATTAATGATTTCCAGATCAATGATAGTTCAGAAAGCAAGCAAGTCAAAGTGA
CCAAGGGCATGGCCTGAAAACTGTTCTAAGAGAGGAATTTACAGAACAACTATTAA
ATGATGTCAATAGGATTGTATTAGTCCGTTTTCATACGGCTATAAAGAACTGCCTGA
GACTGGGTAATTTATAAAGGAAAGAGGTTTAATTGACTCACAGTTCAGCACAACTG
GGCAGGCCTCAGGAAACTTACAATCATGGTAGAAGGTGAAGGGGAAGCAAAGCAC
CTTCCTCACAAGGCGTCAGGAAGAAGTGCCAAGCAAAGGGGGAAAAGCCCCTTGTA
AAACTACCAGAACCTGTGAGAACTCAATCACTATCACAAGAACAGCATGAGGGAAC
CGCCCCTCGTGATTCAATTACCTCCACCTGGTCTCTCCCTTGACACATGGGGATTATG
GGTGTTACAATTCAAGATGAGATTTGGGTGGGGACACAAAGCCTAACCATATCAAG
GATCAAGTGGTGGGTTGAAACTAACAGGATGAGATATATCAGATACAAACACAGGG
TCCCATATTTGGGTTAAAATTCATAAATGATCAAAGCACAGGATGACAGATAATATA
GGTCATTTTAGATTATTGTGGCCAACAGATCACAGTGGGTAGTGTTATGACGAAGGG
AGGGTCACAGTTACTACAGTTACAGATGGATTCTGGGTACAACATTTGCACTAAAGT
GCCTTTGCCAAGGGAGGCAACAGTCTCGACATCCTGTGGCCTGATCTACTTCAGGGA
CTGTGTCTTGTTCAGAGCATCACATTTGAAGAGAACTTTGACCAAGGGGAATATGCC
AGAAAAGGAAGTTCGGGATGCTGAGGATCTTAGGAACTATGTCTAAACAAGATTCA
TTCACAGAAGTGGGAATGTCTATTTGGCAAAAAGAAAATACTACTTACATGGCTGTT
GGAAGACCAGCAATCACAAACTCAGTTTTTCAAAAGGCTGGGCAGAAACACAGATG
AAAGAAACAGGCCATGTTTAAGAAAAGATAAAAGCTCACGCATGATATGCCACTAG
AGAATCACCTAGCCTCAGTGTTGGCGGGGAGGCCTGGGGAGTCTTGATGTCTGAGA
GTGACATTCTGATGATCACTGTCATGTGTAAATGTTGGCCTAAAGCTGCCAATATTT
TTGATTTAAGAGAAGCAAGAAATGCAAATTTTTATGCAGCATGTCTCAATTTTTAAT
TTTGGCAACTATTACAAAATGTTTAAAGAGACTCTGTGCAGCCCAAATATAACATAT
CTATGGGCTGATGGCAGCCCAGCGTTGCCAGTTCACAGGGTCTACAAGAGATGATTC
TTAGTTTCAACAGGGTGCAGTGCTGAAACGCGTGCACAGTAGATTTTGCTTCGGTTA
TGAAAGAACTTCCAAATATTTATGATTCATAGCCAGAGAAAAGGCTCTCTATCCAGG
TTCTGAACAATAGGAAATCATCAAGAGGATATTGGATGACAATATATGAAAGATGT
TATTTGAGAAAGGATTCTCTCCTGAGGCATAGATGTTGAACCAAATTCTATTAGTTA
TGCTTTTACAGCAAGATAGTGGTTTACAGCTTACAAAAGGCTTGTACATCCTCTCAT
ATTAAAAGTTATTAGAACAGTCCTTTGAAGTAGAAAAGTAGGCATTTCTATTTTACA
AACGAGTTGGCCGAGTATCTGAGATAGTAGATAACTCATAGAAGGTCATCCGGGAA
ACGGGGCAGCAGAACTGGGATCGAATGACTCTGGTCATCCAACTCCAAATGCAAAA
GTCTTTCTGCTGCTGCTTCCTAGTTAAACTCTAAGGGTCTAAGACTCCATTCCTAGTT
ATGGTCTCAACTACATTTGCTCATTGCTGTGAGGGGTCAACCCACCTCCCGGAGTCC
TCTCCTGCACATTCTCATGTTCCTGAAAGGCTTTTCTGTCCCTTCCACTACTCCCTGT
AAGCTCCTGTGCTTCACAATTTCTTGTTGAATTTTTTCTAATCTGACTCTATCAGTTAT
GGGAATGTTCCCTCAATTCTTAGTGCTCCAAACCGGACTTGCTCTTGGCTTGTATTTG
TCCAAAATATTTGTCTTCTCTATGTTTTCTACATGTTTGTCTTATAAGGACAAAAACC
TGCCTTAGTTTATCCATGAACAAAGCCACGCATGCTAGTGGACACACACACACATGC
GCGTGCGCGCGCACACACACACACACACACATACACACAGAGACTTTGTATGTGAG
TAATGAATCATCAAATCATCATAATTTCTGGACTTGTATTAATAAGTCGGCCAGGAG
GAAAAGAATCTGCTGTCAATCATGGCTTCTGGTTCTCACAGTCATCTCTACTTTCTTC
CAGCAAGTTTGGTTCTGTCAAAAACCAGCTGTCAGCCTTGTTCCTGCATGCCCAATG
CAGAAGAGTCAGTAAAGAAGATTTGGTTCTCTGTATTTCAGGGGCATCAATGCCAG
GTTGAAATATGCCATTCTGGCCCAGCTCAGTGGCTCACACGTGTAATCCCAGCACTT
TGGAAGGCCAAAGCGGGTGGATTGCTTGAGCTCAGGAGTTCGAGACCAGCCTGGGC
AAGAGGCTGAGGTGGGAGGATGACCTGAGCCCGGGAGGTCAAGGCTGCAGCGAGC
TGTGATCGTGCCACTGCACTCGAGCCAGGGCGTTGGAGTGAGACCCTGTCAAAAAA
AAAAAAAAAAAGGAAGGAAAAAAGGAAGGAAGGAAGGGAGGGAGGGAAGATGCC
ATTCTTAGATTGAAGTGGACTTTATCTGGGCAGAACACACACACACATACACACATG
CACACACACATTGTGGAGAAATTGCTGACTAAGCAAAGCTTCCAAATGACTTAGTTT
GGCTAAAATGTAGGCTTTTAAAAATGTGAGCACTGCCAAGGGTTTTTCCTTGTTGAC
CCATGGATCCATCAAGTGCAAACATTTTCTAATGCACTATATTTAAGCCTGTGCAGC
TAGATGTCATTCAACATGAAATACATTATTACAACTTGCATCTGTCTAAAATCTTGC
ATCTAAAATGAGAGACAAAAAATCTATAAAAATGGAAAACATGCATAGAAATATGT
GAGGGAGGAAAAAATTACCCCCAAGAATGTTAGTGCACGCAGTCACACAGGGAGA
AGACTATTTTTGTTTTGTTTTGATTGTTTTGTTTTGTTTTGGTTGTTTTGTTTTGGTGAC
CTAACTGGTCAAATGACCTATTAAGAATATTTCATAGAACGAATGTTCCGATGCTCT
AATCTCTCTAGACAAGGTTCATATTTGTATGGGTTACTTATTCTCTCTTTGTTGA
CTAAGTCAATAATCAGAATCAGCAGGTTTGCAGTCAGATTGGCAGGGATAAGCAG
CCTAGCTCAGGAGAAGTGAGTATAAAAGCCCCAGGCTGGGAGCAGCCATCACAGAA
GTCCACTCATTCTTGGCAGGATGGCTTCTCATCGTCTGCTCCTCCTCTGCCTTGC
TGGACTGGTATTTGTGTCTGAGGCTGGCCCTACGGTGAGTGTTTCTGTGACATCCC
ATTCCTACATTTAAGATTCACGCTAAATGAAGTAGAAGTGACTCCTTCCAGCTTTGCCAACC
AGCTTTTATTACTAGGGCAAGGGTACCCAGCATCTATTTTTAATATAATTAATTCAAACTTCA
AAAAGAATGAAGTTCCACTGAGCTTACTGAGCTGGGACTTGAACTCTGAGCATTCTACCTC
ATTGCTTTGGTGCATTAGGTTTGTAATATCTGGTACCTCTGTTTCCTCAGATAGATGATAGA
AATAAAGATATGATATTAAGGAAGCTGTTAATACTGAATTTTCAGAAAAGTATCCCTCCATAA
AATGTATTTGGGGGACAAACTGCAGGAGATTATATTCTGGCCCTATAGTTATTCAAAACGTA
TTTATTGATTAATCTTTAAAAGGCTTAGTGAACAATATTCTAGTCAGATATCTAATTCTTAAAT
CCTCTAGAAGAATTAACTAATACTATAAAATGGGTCTGGATGTAGTTCTGACATTATTTTATA
ACAACTGGTAAGAGGGAGTGACTATAGCAACAACTAAAATGATCTCAGGAAAACCTGTTTG
GCCCTATGTATGGTACATTACATCTTTTCAGTAATTCCACTCAAATGGAGACTTTTAACAAA
GCAACTGTTCTCAGGGGACCTATTTTCTCCCTTAAAATTCATTATACACATCCCTGGTTGAT
AGCAGTGTGTCTGGAGGCAGAAACCATTCTTGCTTTGGAAACAATTACGTCTGTGTTATAC
TGAGTAGGGAAGCTCATTAATTGTCGACACTTACGTTCCTGATAATGGGATCAGTGTGTAA
TTCTTGTTTCGCTCCAGATTTCTAATACCACAAAGAATAAATCCTTTCACTCTGATCAATTTT
GTTAACTTCTCACGTGTCTTCTCTACACCCAGGGCACCGGTGAATCCAAGTGTCCTCT
GATGGTCAAAGTTCTAGATGCTGTCCGAGGCAGTCCTGCCATCAATGTGGCCG
TGCATGTGTTCAGAAAGGCTGCTGATGACACCTGGGAGCCATTTGCCTCTGGGT
AAGTTGCCAAAGAACCCTCCCACAGGACTTGGTTTTATCTTCCCGTTTGCCCCTCACTTGG
TAGAGAGAGGCTCACATCATCTGCTAAAGAATTTACAAGTAGATTGAAAAACGTAGGCAGA
GGTCAAGTATGCCCTCTGAAGGATGCCCTCTTTTTGTTTTGCTTAGCTAGGAAGTGACCAG
GAACCTGAGCATCATTTAGGGGCAGACAGTAGAGAAAAGAAGGAATCAGAACTCCTCTCC
TCTAGCTGTGGTTTGCAACCCTTTTGGGTCACAGAACACTTTATGTAGGTGATGAAAAGTA
AACATTCTATGCCCAGAAAAAATGCACAGATACACACACATACAAAATCATATATGTGATTT
TAGGAGTTTCACAGATTCCCTGGTGTCCCTGGGTAACACCAAAGCTAAGTGTCCTTGTCTT
AGAATTTTAGGAAAAGGTATAATGTGTATTAACCCATTAACAAAAGGAAAGGAATTCAGAAA
TATTATTAACCAGGCATCTGTCTGTAGTTAATATGGATCACCCAAAACCCAAGGCTTTTGCC
TAATGAACACTTTGGGGCACCTACTGTGTGCAAGGCTGGGGGCTGTCAAGCTCAGTTAAA
AAAAAAAAGATAGAAGAGATGGATCCATGAGGCAAAGTACAGCCCCAGGCTAATCCCACG
ATCACCCGACTTCATGTCCAAGAGTGGCTTCTCACCTTCATTAGCCAGTTCACAATTTTCAT
GGAGTTTTTCTACCTGCACTAGCAAAAACTTCAAGGAAAATACATATTAATAAATCTAAGCA
AAGTGACCAGAAGACAGAGCAATCAGGAGACCCTTTGCATCCAGCAGAAGAGGAACTGCT
AAGTATTTACATCTCCACAGAGAAGAATTTCTGTTGGGTTTTAATTGAACCCCAAGAACCAC
ATGATTCTTCAACCATTATTGGGAAGATCATTTTCTTAGGTCTGGTTTTAACTGGCTTTTTAT
TTGGGAATTCATTTATGTTTATATAAAATGCCAAGCATAACATGAAAAGTGGTTACAGGACT
ATTCTAAGGGAGAGACAGAATGGACACCAAAAATATTCCAATGTTCTTGTGAATCTTTTCCT
TGCACCAGGACAAAAAAAAAAAGAAGTGAAAAGAAGAAAGGAGGAGGGGCATAATCAGAG
TCAGTAAAGACAACTGCTATTTTTATCTATCGTAGCTGTTGCAGTCAAATGGGAAGCAATTT
CCAACATTCAACTATGGAGCTGGTACTTACATGGAAATAGAAGTTGCCTAGTGTTTGTTGCT
GGCAAAGAGTTATCAGAGAGGTTAAATATATAAAAGGGAAAAGAGTCAGATACAGGTTCTT
CTTCCTACTTTAGGTTTTCCACTGTGTGTGCAAATGATACTCCCTGGTGGTGTGCAGATGC
CTCAAAGCTATCCTCACACCACAAGGGAGAGGAGCGAGATCCTGCTGTCCTGGAGAAGTG
CAGAGTTAGAACAGCTGTGGCCACTTGCATCCAATCATCAATCTTGAATCACAGGGACTCT
TTCTTAAGTAAACATTATACCTGGCCGGGCACGGTGGCTCACGCCTGTAATCCCAGCACTT
TGGGATGCCAAAGTGGGCATATCATCTGAGGTCAGGAGTTCAAGACCAGCCTGGCCAACA
TGGCAAAACTCCGTCTTTATGAAAAATACAAAAATTAGCCAGGCATGGTGGCAGGCGCCTG
TAATCCCAGCTAATTGGGAGGCTGAGGCTGGAGAATCCCTTGAATCTAGGAGGCAGAGGT
TGCAGTGAGCTGAGATCGTGCCATTGCACTCCAGCCTGGGTGACAAGAGTAAAACTCTGT
CTCAAAAAAAAAAAATTATACCTACATTCTCTTCTTATCAGAGAAAAAAATCTACAGTGAGCT
TTTCAAAAAGTTTTTACAAACTTTTTGCCATTTAATTTCAGTTAGGAGTTTTCCCTACTTCTGA
CTTAGTTGAGGGGAAATGTTCATAACATGTTTATAACATGTTTATGTGTGTTAGTTGGTGGG
GGTGTATTACTTTGCCATGCCATTTGTTTCCTCCATGCGTAACTTAATCCAGACTTTCACAC
CTTATAGGAAAACCAGTGAGTCTGGAGAGCTGCATGGGCTCACAACTGAGGAGG
AATTTGTAGAAGGGATATACAAAGTGGAAATAGACACCAAATCTTACTGGAAG
GCACTTGGCATCTCCCCATTCCATGAGCATGCAGAGGTGAGTATACAGACCTTCGA
GGGTTGTTTTGGTTTTGGTTTTTGCTTTTGGCATTCCAGGAAATGCACAGTTTTACTCAGTG
TACCACAGAAATGTCCTAAGGAAGGTGATGAATGACCAAAGGTTCCCTTTCCTATTATACAA
GAAAAAATTCACAACACTCTGAGAAGCAAATTTCTTTTTGACTTTGATGAAAATCCACTTAGT
AACATGACTTGAACTTACATGAAACTACTCATAGTCTATTCATTCCACTTTATATGAATATTG
ATGTATCTGCTGTTGAAATAATAGTTTATGAGGCAGCCCTCCAGACCCCACGTAGAGTGTA
TGTAACAAGAGATGCACCATTTTATTTCTCGAAAACCCGTAACATTCTTCATTCCAAAACAC
ATCTGGCTTCTCGGAGGTCTGGACAAGTGATTCTTGGCAACACATACCTATAGAGACAATA
AAATCAAAGTAATAATGGCAACACAATAGATAACATTTACCAAGCATACACCATGTGGCAGA
CACAATTATAAGTGTTTTCCATATTTAACCTACTTAATCCTCAGGAATAAGCCACTGAGGTC
AGTCCTATTATTATCCCCATCTTATAGATGAAGAAAATGAGGCACCAGGAAGTCAAATAACT
TGTCAAAGGTCACAAGACTAGGAAATACACAAGTAGAAATGTTTACAATTAAGGCCCAGGC
TGGGTTTGCCCTCAGTTCTGCTATGCCTCGCATTATGCCCCAGGAAACTTTTTCCCTTGTG
AAAGCCAAGCTTAAAAAAAGAAAAGCCACATTTGTAACGTGCTCTGTTCCCCTGCCTATGG
TGAGGATCTTCAAACAGTTATACATGGACCCAGTCCCCCTGCCTTCTCCTTAATTTCTTAAG
TCATTTGAAACAGATGGCTGTCATGGAAATAGAATCCAGACATGTTGGTCAGAGTTAAAGA
TCAACTAATTCCATCAAAAATAGCTCGGCATGAAAGGGAACTATTCTCTGGCTTAGTCATG
GATGAGACTTTCAATTGCTATAAAGTGGTTCCTTTATTAGACAATGTTACCAGGGAAACAAC
AGGGGTTTGTTTGACTTCTGGGGCCCACAAGTCAACAAGAGAGCCCCATCTACCAAGGAG
CATGTCCCTGACTACCCCTCAGCCAGCAGCAAGACATGGACCCCAGTCAGGGCAGGAGC
AGGGTTTCGGCGGCGCCCAGCACAAGACATTGCCCCTAGAGTCTCAGCCCCTACCCTCG
AGTAATAGATCTGCCTACCTGAGACTGTTGTTTGCCCAAGAGCTGGGTCTCAGCCTGATG
GGAACCATATAAAAAGGTTCACTGACATACTGCCCACATGTTGTTCTCTTTCATTAGATCTT
AGCTTCCTTGTCTGCTCTTCATTCTTGCAGTATTCATTCAACAAACATTAAAAAAAAAAAAAA
GCATTCTATGTGTGGAACACTCTGCTAGATGCTGTGGATTTAGAAATGAAAATACATCCCG
ACCCTTGGAATGGAAGGGAAAGGACTGAAGTAAGACAGATTAAGCAGGACCGTCAGCCCA
GCTTGAAGCCCAGATAAATACGGAGAACAAGAGAGAGCGAGTAGTGAGAGATGAGTCCCA
ATGCCTCACTTTGGTGACGGGTGCGTGGTGGGCTTCATGCAGCTTCTTCTGATAAATGCCT
CCTTCAGAACTGGTCAACTCTACCTTGGCCAGTGACCCAGGTGGTCATAGTAGATTTACCA
AGGGAAAATGGAAACTTTTATTAGGAGCTCTTAGGCCTCTTCACTTCATGGATTTTTTTTTC
CTTTTTTTTTGAGATGGAGTTTTGCCCTGTCACCCAGGCTGGAATGCAGTGGTGCAATCTC
AGCTCACTGCAACCTCCGCCTCCCAGGTTCAAGCAATTCTCCTGCCTCAGCCTCCCGAGT
AGCTGGGACTACAGGTGTGCGCCACCACACCAGGCTAATTTTTGTATTTTTTGTAAAGACA
GGTTTTCACCACGTTGGCCAGGCTGGTCTGAACTCCAGACCTCAGGTGATTCACCTGTCT
CAGCCTCCCAAAGTGCTGGGATTACAGGTGTGAGCCACCGTGCCCGGCTACTTCATGGAT
TTTTGATTACAGATTATGCCTCTTACAATTTTTAAGAAGAATCAAGTGGGCTGAAGGTCAAT
GTCACCATAAGACAAAAGACATTTTTATTAGTTGATTCTAGGGAATTGGCCTTAAGGGGAG
CCCTTTCTTCCTAAGAGATTCTTAGGTGATTCTCACTTCCTCTTGCCCCAGTATTATTTTTGT
TTTTGGTATGGCTCACTCAGATCCTTTTTTCCTCCTATCCCTAAGTAATCCGGGTTTCTTTTT
CCCATATTTAGAACAAAATGTATTTATGCAGAGTGTGTCCAAACCTCAACCCAAGGCCTGTA
TACAAAATAAATCAAATTAAACACATCTTTACTGTCTTCTACCTCTTTCCTGACCTCAATATAT
CCCAACTTGCCTCACTCTGAGAACCAAGGCTGTCCCAGCACCTGAGTCGCAGATATTCTA
CTGATTTGACAGAACTGTGTGACTATCTGGAACAGCATTTTGATCCACAATTTGCCCAGTTA
CAAAGCTTAAATGAGCTCTAGTGCATGCATATATATTTCAAAATTCCACCATGATCTTCCAC
ACTCTGTATTGTAAATAGAGCCCTGTAATGCTTTTACTTCGTATTTCATTGCTTGTTATACAT
AAAAATATACTTTTCTTCTTCATGTTAGAAAATGCAAAGAATAGGAGGGTGGGGGAATCTCT
GGGCTTGGAGACAGGAGACTTGCCTTCCTACTATGGTTCCATCAGAATGTAGACTGGGAC
AATACAATAATTCAAGTCTGGTTTGCTCATCTGTAAATTGGGAAGAATGTTTCCAGCTCCAG
AATGCTAAATCTCTAAGTCTGTGGTTGGCAGCCACTATTGCAGCAGCTCTTCAATGACTCA
ATGCAGTTTTGCATTCTCCCTACCTTTTTTTTCTAAAACCAATAAAATAGATACAGCCTTTAG
GCTTTCTGGGATTTCCCTTAGTCAAGCTAGGGTCATCCTGACTTTCGGCGTGAATTTGCAA
AACAAGACCTGACTCTGTACTCCTGCTCTAAGGACTGTGCATGGTTCCAAAGGCTTAGCTT
GCCAGCATATTTGAGCTTTTTCCTTCTGTTCAAACTGTTCCAAAATATAAAAGAATAAAATTA
ATTAAGTTGGCACTGGACTTCCGGTGGTCAGTCATGTGTGTCATCTGTCACGTTTTTCGGG
CTCTGGTGGAAATGGATCTGTCTGTCTTCTCTCATAGGTGGTATTCACAGCCAACGAC
TCCGGCCCCCGCCGCTACACCATTGCCGCCCTGCTGAGCCCCTACTCCTATTCC
ACCACGGCTGTCGTCACCAATCCCAAGGAATGAGGGACTTCTCCTCCAGTGGACC
TGAAGGACGAGGGATGGGATTTCATGTAACCAAGAGTATTCCATTTTTACTAAAGCA
GTGTTTTCACCTCATATGCTATGTTAGAAGTCCAGGCAGAGACAATAAAACATTCCT
GTGAAAGGCACTTTTCATTCCACTTTAACTTGATTTTTTAAATTCCCTTATTGTCCCTT
CCAAAAAAAAGAGAATCAAAATTTTACAAAGAATCAAAGGAATTCTAGAAAGTATC
TGGGCAGAACGCTAGGAGAGATCCAAATTTCCATTGTCTTGCAAGCAAAGCACGTA
TTAAATATGATCTGCAGCCATTAAAAAGACACATTCTGTAAATGAGAGAGCCTTATT
TTCCTGTAACCTTCAGCAAATAGCAAAAGACACATTCCAAGGGCCCACTTCTTTACT
GTGGGCATTTCTTTTTTTTTCTTTTTTTCTTTTTTCCTTTTTTGAGACAAAGTCTCACTC
TGTTGCCCAGGCTAGAATGCAGTGGTGTAATCTCAGCTCACTGCAACCTCTGCTTCC
TGGGTTCAAGCGATTCTCCTGCCTCAGCCTCCCAAGTAACTGGGATTACAGGCGCAT
GCCACCACGCCTAGCTCATTTTTGTATTTTTAGTAGAGATGGGATTTTGCCATGTTGG
CTAGGCTGGTCTACGAACTCCTGACCTCAGGTGATCCACCTGCCTCAGCCTCCCAAA
GTGCTGGGATTACAGGCATGAGCCACTACACCCGGCCCCTACTCTGGGCATTTCTTT
GATTAAAGAGAAGGGGAGCTCCAACAAGATACACCTGCAGCAACTCAGGCCGTCTG
ATCAGTTCAGGCCAGATCTACACTGCAACCAGCCAGGTCAGGGGAAAACCAAAGAA
CCCCACACACCCAATTTACTTAGGCTGATCCAAAATCCATGTATGGAGAACTCACAT
GCACCAGGCACTATTTTAGGTGAACTGAATATAAAGAATAGGACCCAGTACCTGCA
TTTACTTAAAGAACTCACAATCTTTTGAGAACATAACTGTTTCATCATGGTTTGGCA
GGAGGCTATGGTACAAGGCACAGCAAGGGTAAGAAGGAGGAAGAAACCAACACCC
TACAGAAATCAGGGAATGACTCTGAATAGGTGTCACTTAATCTGAGTGTTGGTAATT
TGTCAGATAGACAAGGGAAAAGGTATTCTAGGTAGAGAGAATACAGTTTGCAAGGC
CCAGCCAAGTGAAACAATTTGATAAGTTGAGAGAGCAGACGACGATTCAGAATGTT
GAAGGGCAAAGGTATTGAGGTGGGATGGGTTATGCTGCTATCACAAATAACCCCAA
ATCTCGGGGGCTTAACAAAGTAAAAGTTTAGTCTCAGTTGTGCCAGGTCCAATGTAG
AACTCTTTGCTCTAGAGACTCTTTAGGGTGGCTTTCCTTCTAATGGTGACTGTTTGAG
ACAGTTTGATTTAGTCTTGTGGCTTCAAGGTCACTCTGGTGATATTTAGCCAGCAGA
CTGAGGGAACATAGTATGGTATTAGACCCCTCTGTGCTGAAGTGTCACACATGAGTC
CCATTGACTTCTCACTGGCCAGAGCTAGTTACATGCCCCCATCTAGATGTGCTGAGA
AATGTGGCCCCTGGCTGGGAGCCATTTCCCAGAACAACTAACTCTATGCTCTGGAAG
AGGAGCACTAATCTGAGTTGGCCAACAACCATCTCTACCACAGTAGGGTTGGGACT
GGTGGGGCATGAGGCTGGAGTGAAGGTTGGTTTTATCTGCCACGCGTTACAGCTGTG
AATTTGTCTTGAAAGCAACATGGGTCCATTGAAGGGAACCTTGACATCAGTCATGTG
GCTGGGACAAGAATAGTTACCACTTGCCCGTAATCTCCAACCAGGATTCTCCAGGAG
AACCTGAGTTAGACACATGGCTTAGGCCTAAACCTACCTGAGTGGTCTTTCTATTTT
CCTCCAAATTCAAATCTCAAATCTTGCTACCCTCTAACTGGCTATGTTGAGAGAGGA
AAAAACTTGAAGAGAATGCAGTGTAGCTTTGGAGTTTTTCACATGCACTTTTCCCAA
GATACATAGCAAAATCAATGTCTCCAATTCTATTAATGTTGTTAGCAAGTCCTTGTTC
CATGCATATTGGTTAATCCATAGCAAATTGCCATTTTTATAGACTAAATGGTCAAAT
ATTGGCAATTTCATAAGGTTCAGTCTATTACCTACCATGATTGTATTGGTCACTAACC
TGCCTATTTTTAGAATGCTACATATTCATTTGGCTGTTGTTAAATAGCTATGGATTTT
TATAATCAAAACAGGTTGAAAATATGAATCAGTTTAAAACCACATACA.

[0076] In the above TTR polynucleotide sequence provided at NCBI Reference Sequence No. NG_009490.1, exons encoding the TTR polypeptide correspond to the union of nucleotides 5137 . . . 5205, 6130 . . . 6260, 8354 . . . 8489, and 11802 . . . 11909, and the intervening sequences correspond to intron sequences. The union of nucleotides 5137 . . . 5205, 6130 . . . 6260, 8354 . . . 8489, and 11802 . . . 11909 corresponds to Consensus Coding Sequence (CCDS) No. 11899.1.

[0077] By “transthyretin amyloidosis” is meant a disease associated with a buildup of amyloid deposits comprising transthyretin in a tissue of a subject. The tissue can be organ tissue. The organ can be the liver.

[0078] By “amyloidosis” is meant a disease associated with buildup of amyloid in a tissue of a subject. The tissue can be organ tissue. The organ can be the liver.

[0079] By “adenine” or “9H-Purin-6-amine” is meant a purine nucleobase with the molecular formula C₅H₅N₅, having the structure

[chemical structure]

and corresponding to CAS No. 73-24-5.

[0080] By “adenosine” or “4-Amino-1-[(2R,3R,4S,5R)-3,4-dihy droxy-5-(hydroxymethyl)oxolan-2-yl]pyrimidin-2(1H)-one” is meant an adenine molecule attached to a ribose sugar via a glycosidic bond, having the structure

[chemical structure]

and corresponding to CAS No. 65-46-3. Its molecular formula is C₁₀H₁₃N₅O₄. The terms “adenine” and “adenosine” are used interchangeably throughout this document.

[0081] By “adenosine deaminase” or “adenine deaminase” is meant a polypeptide or fragment thereof capable of catalyzing the hydrolytic deamination of adenine or adenosine. The terms “adenine deaminase” and “adenosine deaminase” are used interchangeably throughout the application. In some embodiments, the deaminase or deaminase domain is an adenosine deaminase catalyzing the hydrolytic deamination of adenosine to inosine or deoxy adenosine to deoxyinosine. In some embodiments, the adenosine deaminase catalyzes the hydrolytic deamination of adenine or adenosine in deoxyribonucleic acid (DNA). The adenosine deaminases (e.g. engineered adenosine deaminases, evolved adenosine deaminases) provided herein may be from any organism, such as a bacterium. In some embodiments, the adenosine deaminase is an adenosine deaminase variant with one or more alterations and is capable of deaminating both adenine and cytosine in a target polynucleotide (e.g., DNA). In some embodiments, the target polynucleotide is single or double stranded. In some embodiments, the adenosine deaminase variant is capable of deaminating both adenine and cytosine in DNA. In some embodiments, the adenosine deaminase variant is capable of deaminating both adenine and cytosine in single-stranded DNA. In some embodiments, the adenosine deaminase variant is capable of deaminating both adenine and cytosine in RNA.

[0082] By “adenosine deaminase activity” is meant catalyzing the deamination of adenine or adenosine to guanine in a polynucleotide. In some embodiments, an adenosine deaminase variant as provided herein maintains adenosine deaminase activity (e.g., at least about 30%, 40%, 50%, 60%, 70%, 80%, 90% or more of the activity of a reference adenosine deaminase (e.g., TadA*8.20 or TadA*8.19)).

[0083] By “Adenosine Base Editor 8.8 (ABE8.8) polypeptide” or “ABE8.8” is meant a base editor comprising an adenosine deaminase.

[0084] By “Adenosine Base Editor (ABE) polynucleotide” is meant a polynucleotide encoding an ABE.

[0085] By “Adenosine Base Editor 8 (ABE8.8)” or “ABE8.8” is meant a base editor as defined herein comprising an adenosine deaminase variant comprising the alterations Y123H, Y147R, and Q154R relative to the following reference sequence: MSEVEFSHEYWMRHALTLAKRARDEREVPVGAVLVLNNRVIGEGWNRAIGLHDPTAH AEIMALRQGGLVMQNYRLIDATLYVTFEPCVMCAGAMIHSRIGRVVFGVRNAKTGAAG SLMDVLHYPGMNHRVEITEGILADECAALLCYFFRMPRQVFNAQKKAQSSTD (SEQ ID NO: 4; TadA*7.10), or a corresponding position in another adenosine deaminase. In some embodiments, ABE8.8 comprises further alterations (e.g., 1, 2, 3, 4, 5, 6, 7, 8, 9, 10, 11, 13, 14, or 15 alterations) relative to the reference sequence, or a corresponding position in another adenosine deaminase.

[0086] By “Adenosine Base Editor 8.8 (ABE8.8) polynucleotide” is meant a polynucleotide encoding an ABE8.8 polypeptide.

[0087] By “Adenosine Base Editor 8.13 (ABE8.13) polypeptide” or “ABE8.13” is meant a base editor as defined herein comprising an adenosine deaminase variant comprising the alterations I76Y, Y123H, Y147R, and Q154R relative to the following reference sequence: MSEVEFSHEYWMRHALTLAKRARDEREVPVGAVLVLNNRVIGEGWNRAIGLHDPTAH AEIMALRQGGLVMQNYRLIDATLYVTFEPCVMCAGAMIHSRIGRVVFGVRNAKTGAAG SLMDVLHYPGMNHRVEITEGILADECAALLCYFFRMPRQVFNAQKKAQSSTD (SEQ ID NO: 4; TadA*7.10). In some embodiments, ABE8.13 comprises further alterations (e.g., 1, 2, 3, 4, 5, 6, 7, 8, 9, 10, 11, 13, 14, or 15 alterations) relative to the reference sequence.

[0088] By “Adenosine Base Editor 8.13 (ABE8.13) polynucleotide” is meant a polynucleotide encoding an ABE8.13 polypeptide.

[0089] “Administering” is referred to herein as providing one or more compositions described herein to a patient or a subject.

[0090] By “agent” is meant any small molecule chemical compound, antibody, nucleic acid molecule, or polypeptide, or fragments thereof.

[0091] By “alteration” is meant a change (increase or decrease) in the level, structure, or activity of an analyte, gene or polypeptide as detected by standard art known methods such as those described herein. As used herein, an alteration includes a 10% change in expression levels, a 25% change, a 40% change, and a 50% or greater change in expression levels. In some embodiments, an alteration includes an insertion, deletion, or substitution of a nucleobase or amino acid.

[0092] By “ameliorate” is meant decrease, suppress, attenuate, diminish, arrest, or stabilize the development or progression of a disease.

[0093] By “analog” is meant a molecule that is not identical, but has analogous functional or structural features. For example, a polypeptide analog retains the biological activity of a corresponding naturally-occurring polypeptide, while having certain biochemical modifications that enhance the analog's function relative to a naturally occurring polypeptide. Such biochemical modifications could increase the analog's protease resistance, membrane permeability, or half-life, without altering, for example, ligand binding. An analog may include an unnatural amino acid.

[0094] By “base editor (BE),” or “nucleobase editor polypeptide (NBE)” is meant an agent that binds a polynucleotide and has nucleobase modifying activity. In various embodiments, the base editor comprises a nucleobase modifying polypeptide (e.g., a deaminase) and a polynucleotide programmable nucleotide binding domain (e.g., Cas9 or Cpf1) in conjunction with a guide polynucleotide (e.g., guide RNA (gRNA)). Representative nucleic acid and protein sequences of base editors are provided in the Sequence Listing as SEQ ID NOs: 5-14.

[0095] By “Base Editor 4 polypeptide” or “BE4” is meant a base editor as defined herein comprising a cytidine deaminase variant comprising a sequence with at least about 85% sequence identity to the following reference sequence:

(SEQ ID NO: 15
MSSETGPVAVDPTLRRRIEPHEFEVFFDPRELRKETCLLYEINWGGRHS
IWRHTSQNTNKHVEVNFIEKFTTERYFCPNTRCSITWFLSWSPCGECSR
AITEFLSRYPHVTLFIYIARLYHHADPRNRQGLRDLISSGVTIQIMTEQ
ESGYCWRNFVNYSPSNEAHWPRYPHLWVRLYVLELYCIILGLPPCLNIL
RRKQPQLTFFTIALQSCHYQRLPPHILWATGLK;

BE4 cytidine deaminase domain). In some embodiments, BE4 comprises further alterations (e.g., 1, 2, 3, 4, 5, 6, 7, 8, 9, 10, 11, 13, 14, or 15 alterations) relative to the reference sequence.

[0096] By “Base Editor 4 polynucleotide” or “BE4 polynucleotide” is meant a polynucleotide encoding a BE4 polypeptide.

[0097] By “base editing activity” is meant acting to chemically alter a base within a polynucleotide. In one embodiment, a first base is converted to a second base. In one embodiment, the base editing activity is cytidine deaminase activity, e.g., converting target C•G to T•A. In another embodiment, the base editing activity is adenosine or adenine deaminase activity, e.g., converting A•T to G•C.

[0098] The term “base editor system” refers to an intermolecular complex for editing a nucleobase of a target nucleotide sequence. In various embodiments, the base editor (BE) system comprises (1) a polynucleotide programmable nucleotide binding domain, a deaminase domain (e.g., cytidine deaminase or adenosine deaminase) for deaminating nucleobases in the target nucleotide sequence; and (2) one or more guide polynucleotides (e.g., guide RNA) in conjunction with the polynucleotide programmable nucleotide binding domain. In various embodiments, the base editor (BE) system comprises a nucleobase editor domain selected from an adenosine deaminase or a cytidine deaminase, and a domain having nucleic acid sequence specific binding activity. In some embodiments, the base editor system comprises (1) a base editor (BE) comprising a polynucleotide programmable DNA binding domain and a deaminase domain for deaminating one or more nucleobases in a target nucleotide sequence; and (2) one or more guide RNAs in conjunction with the polynucleotide programmable DNA binding domain. In some embodiments, the polynucleotide programmable nucleotide binding domain is a polynucleotide programmable DNA binding domain. In some embodiments, the base editor is a cytidine base editor (CBE). In some embodiments, the base editor is an adenine or adenosine base editor (ABE). In some embodiments, the base editor is an adenine or adenosine base editor (ABE) or a cytidine base editor (CBE).

[0099] By “base editing activity” is meant acting to chemically alter a base within a polynucleotide. In one embodiment, a first base is converted to a second base. In one embodiment, the base editing activity is cytidine deaminase activity, e.g., converting target C•G to T•A. In another embodiment, the base editing activity is adenosine deaminase activity, e.g., converting A•T to G•C.

[0100] By “bhCas12b v4 polypeptide” or “bhCas12b v4” is meant an endonuclease variant comprising a sequence with at least about 85% sequence identity to the following reference sequence and having endonuclease activity: MAPKKKRKVGIHGVPAAATRSFILKIEPNEEVKKGLWKTHEVLNHGIAYYMNILKLIRQ EAIYEHHEQDPKNPKKVSKAEIQAELWDFVLKMQKCNSFTHEVDKDEVFNILRELYEEL VPSSVEKKGEANQLSNKFLYPLVDPNSQSGKGTASSGRKPRWYNLKIAGDPSWEEEKK KWEEDKKKDPLAKILGKLAEYGLIPLFIPYTDSNEPIVKEIKWMEKSRNQSVRRLDKDM FIQALERFLSWESWNLKVKEEYEKVEKEYKTLEERIKEDIQALKALEQYEKERQEQLLR DTLNTNEYRLSKRGLRGWREIIQKWLKMDENEPSEKYLEVFKDYQRKHPREAGDYSVY EFLSKKENHFIWRNHPEYPYLYATFCEIDKKKKDAKQQATFTLADPINHPLWVRFEERS GSNLNKYRILTEQLHTEKLKKKLTVQLDRLIYPTESGGWEEKGKVDIVLLPSRQFYNQIF LDIEEKGKHAFTYKDESIKFPLKGTLGGARVQFDRDHLRRYPHKVESGNVGRIYFNMTV NIEPTESPVSKSLKIHRDDFPKVVNFKPKELTEWIKDSKGKKLKSGIESLEIGLRVMSIDL GQRQAAAASIFEVVDQKPDIEGKLFFPIKGTELYAVHRASFNIKLPGETLVKSREVLRKA REDNLKLMNQKLNFLRNVLHFQQFEDITEREKRVTKWISRQENSDVPLVYQDELIQIREL MYKPYKDWVAFLKQLHKRLEVEIGKEVKHWRKSLSDGRKGLYGISLKNIDEIDRTRKF LLRWSLRPTEPGEVRRLEPGQRFAIDQLNHLNALKEDRLKKMANTIIMHALGYCYDVR KKKWQAKNPACQIILFEDLSNYNPYGERSRFENSRLMKWSRREIPRQVALQGEIYGLQV GEVGAQFSSRFHAKTGSPGIRCRVVTKEKLQDNRFFKNLQREGRLTLDKIAVLKEGDLY PDKGGEKFISLSKDRKCVTTHADINAAQNLQKRFWTRTHGFYKVYCKAYQVDGQTVYI PESKDQKQKIIEEFGEGYFILKDGVYEWVNAGKLKIKKGSSKQSSSELVDSDILKDSFDL ASELKGEKLMLYRDPSGNVFPSDKWMAAGVFFGKLERILISKLTNQYSISTIEDDSSKQS MSGGSKRTADGSEFESPKKKRKVE (SEQ ID NO: 450). In some embodiments, bhCAS12b v4 comprises further alterations (e.g., 1, 2, 3, 4, 5, 6, 7, 8, 9, 10, 11, 13, 14, or 15 alterations) relative to the reference sequence.

[0101] By “bhCas12b v4 polynucleotide” is meant a polynucleotide encoding a bhCas12b v4.

[0102] The term “Cas9” or “Cas9 domain” refers to an RNA guided nuclease comprising a Cas9 protein, or a fragment thereof (e.g., a protein comprising an active, inactive, or partially active DNA cleavage domain of Cas9, and/or the gRNA binding domain of Cas9). A Cas9 nuclease is also referred to sometimes as a casnl nuclease or a CRISPR (clustered regularly interspaced short palindromic repeat) associated nuclease.

[0103] The term “conservative amino acid substitution” or “conservative mutation” refers to the replacement of one amino acid by another amino acid with a common property. A functional way to define common properties between individual amino acids is to analyze the normalized frequencies of amino acid changes between corresponding proteins of homologous organisms (Schulz, G. E. and Schirmer, R. H., Principles of Protein Structure, Springer-Verlag, New York (1979)). According to such analyses, groups of amino acids can be defined where amino acids within a group exchange preferentially with each other, and therefore resemble each other most in their impact on the overall protein structure (Schulz, G. E. and Schirmer, R. H., supra). Non-limiting examples of conservative mutations include amino acid substitutions of amino acids, for example, lysine for arginine and vice versa such that a positive charge can be maintained; glutamic acid for aspartic acid and vice versa such that a negative charge can be maintained; serine for threonine such that a free —OH can be maintained; and glutamine for asparagine such that a free —NH₂ can be maintained.

[0104] The term “coding sequence” or “protein coding sequence” as used interchangeably herein refers to a segment of a polynucleotide that codes for a protein. Coding sequences can also be referred to as open reading frames. The region or sequence is bounded nearer the 5′ end by a start codon and nearer the 3′ end with a stop codon. Stop codons useful with the base editors described herein include the following:

| | |
|---|---|
| Glutamine | CAG → TAG Stop codon |
| | CAA → TAA |
| Arginine | CGA → TGA |
| Tryptophan | TGG → TGA |
| | TGG → TAG |
| | TGG → TAA |

[0105] By “complex” is meant a combination of two or more molecules whose interaction relies on inter-molecular forces. Non-limiting examples of inter-molecular forces include covalent and non-covalent interactions. Non-limiting examples of non-covalent interactions include hydrogen bonding, ionic bonding, halogen bonding, hydrophobic bonding, van der Waals interactions (e.g., dipole-dipole interactions, dipole-induced dipole interactions, and London dispersion forces), and π-effects. In an embodiment, a complex comprises polypeptides, polynucleotides, or a combination of one or more polypeptides and one or more polynucleotides. In one embodiment, a complex comprises one or more polypeptides that associate to form a base editor (e.g., base editor comprising a nucleic acid programmable DNA binding protein, such as Cas9, and a deaminase) and a polynucleotide (e.g., a guide RNA). In an embodiment, the complex is held together by hydrogen bonds. It should be appreciated that one or more components of a base editor (e.g., a deaminase, or a nucleic acid programmable DNA binding protein) may associate covalently or non-covalently. As one example, a base editor may include a deaminase covalently linked to a nucleic acid programmable DNA binding protein (e.g., by a peptide bond). Alternatively, a base editor may include a deaminase and a nucleic acid programmable DNA binding protein that associate noncovalently (e.g., where one or more components of the base editor are supplied in trans and associate directly or via another molecule such as a protein or nucleic acid). In an embodiment, one or more components of the complex are held together by hydrogen bonds. Throughout the present disclosure, wherever an embodiment of a base editor is contemplated as containing a fusion protein, complexes comprising one or more domains of the base editor, or fragments thereof, are also contemplated.

[0106] By “cytidine” is meant a cytosine molecule attached to a ribose sugar via a glycosidic bond, having the structure

[chemical structure]

and corresponding to CAS No. 65-46-3. Its molecular formula is C₉H₁₃N₃O₅. The terms “cytosine” and “cytidine” are used interchangeably throughout this document.

[0107] By “cytidine deaminase” is meant a polypeptide or fragment thereof capable of catalyzing a deamination reaction that converts an amino group of cytidine to a carbonyl group. In one embodiment, the cytidine deaminase converts cytosine to uracil or 5-methylcytosine to thymine. The terms “cytidine deaminase” and “cytosine deaminase” are used interchangeably throughout the application. PmCDA1 (SEQ ID NO: 17-18), which is derived from Petromyzon marinus (Petromyzon marinus cytosine deaminase 1, “PmCDA1”), AID (Activation-induced cytidine deaminase; AICDA) (Exemplary AID polypeptide sequences are provided in the Sequence Listing as SEQ ID NOs: 19-25), which is derived from a mammal (e.g., human, swine, bovine, horse, monkey etc.), and APOBEC are exemplary cytidine deaminases (Exemplary APOBEC polypeptide sequences are provided in the Sequence Listing as SEQ ID NOs: 15 and 26-65. Further exemplary cytidine deaminase (CDA) sequences are provided in the Sequence Listing as SEQ ID NOs: 66-70. Additional exemplary cytidine deaminase sequences, including APOBEC polypeptide sequences, are provided in the Sequence Listing as SEQ ID NOs: 71-193.

[0108] By “cytosine” or “4-Aminopyrimidin-2(1H)-one” is meant a purine nucleobase with the molecular formula C₄H₅N₃O, having the structure

[chemical structure]

and corresponding to CAS No. 71-30-7.

[0109] By “cytosine deaminase activity” is meant catalyzing the deamination of cytosine in a polynucleotide, thereby converting an amino group to a carbonyl group. In one embodiment, a polypeptide having cytosine deaminase activity converts cytosine to uracil (i.e., C to U) or 5-methylcytosine to thymine (i.e., 5 mC to T). In some embodiments, an adenosine deaminase variant as provided herein has an increased cytosine deaminase activity (e.g., at least 10-fold, 20-fold, 30-fold, 40-fold, 50-fold, 60-fold, 70-fold, 80-fold, 90-fold, 100-fold or more) relative to a reference adenosine deaminase (e.g., TadA*8.20 or TadA*8.19).

[0110] The term “deaminase” or “deaminase domain,” as used herein, refers to a protein or enzyme that catalyzes a deamination reaction.

[0111] “Detect” refers to identifying the presence, absence or amount of the analyte to be detected. In one embodiment, a sequence alteration in a polynucleotide or polypeptide is detected. In another embodiment, the presence of indels is detected.

[0112] By “detectable label” is meant a composition that when linked to a molecule of interest renders the latter detectable, via spectroscopic, photochemical, biochemical, immunochemical, or chemical means. For example, useful labels include radioactive isotopes, magnetic beads, metallic beads, colloidal particles, fluorescent dyes, electron-dense reagents, enzymes (for example, as commonly used in an enzyme linked immunosorbent assay (ELISA)), biotin, digoxigenin, or haptens.

[0113] By “disease” is meant any condition or disorder that damages or interferes with the normal function of a cell, tissue, or organ. Exemplary diseases include diseases amenable to treatment using the methods and/or compositions of the present disclosure include as non-limiting examples amyloidosis, cardiomyopathy, familial amyloid polyneuropathy (FAP), familial amyloid cardiomyopathy (FAC), familial transthyretin amyloidosis (FTA), senile systemic amyloidosis (SSA), transthyretin amyloidosis, and the like. The disease can be any disease associated with a mutation to a transthyretin (TTR) polynucleotide sequence.

[0114] By “effective amount” is meant the amount of an agent or active compound, e.g., a base editor as described herein, that is required to ameliorate the symptoms of a disease relative to an untreated patient or an individual without disease, i.e., a healthy individual, or is the amount of the agent or active compound sufficient to elicit a desired biological response. The effective amount of active compound(s) used to practice the present invention for therapeutic treatment of a disease varies depending upon the manner of administration, the age, body weight, and general health of the subject. Ultimately, the attending physician or veterinarian will decide the appropriate amount and dosage regimen. Such amount is referred to as an “effective” amount. In one embodiment, an effective amount is the amount of a base editor of the invention sufficient to introduce an alteration in a gene of interest in a cell (e.g., a cell in vitro or in vivo). In one embodiment, an effective amount is the amount of a base editor required to achieve a therapeutic effect. Such therapeutic effect need not be sufficient to alter a pathogenic gene in all cells of a subject, tissue or organ, but only to alter the pathogenic gene in about 1%, 5%, 10%, 25%, 50%, 75% or more of the cells present in a subject, tissue or organ. In one embodiment, an effective amount is sufficient to ameliorate one or more symptoms of a disease.

[0115] The term “exonuclease” refers to a protein or polypeptide capable of digesting a nucleic acid molecule from a free ends The nucleic acid can be DNA or RNA.

[0116] The term “endonuclease” refers to a protein or polypeptide capable of catalyzing internal regions in a nucleic acid molecule. The nucleic acid molecule can be DNA or RNA.

[0117] By “fragment” is meant a portion of a polypeptide or nucleic acid molecule. This portion contains, at least about 10%, 20%, 30%, 40%, 50%, 60%, 70%, 80%, or 90% of the entire length of the reference nucleic acid molecule or polypeptide. A fragment may contain 10, 20, 30, 40, 50, 60, 70, 80, 90, or 100, 200, 300, 400, 500, 600, 700, 800, 900, or 1000 nucleotides or amino acids.

[0118] By “guide RNA” or “gRNA” is meant a polynucleotide or polynucleotide complex which is specific for a target sequence and can form a complex with a polynucleotide programmable nucleotide binding domain protein (e.g., Cas12b, Cas9 or Cpf1). In an embodiment, the guide polynucleotide is a guide RNA (gRNA). gRNAs can exist as a complex of two or more RNAs, or as a single RNA molecule.

[0119] “Hybridization” means hydrogen bonding, which may be Watson-Crick, Hoogsteen or reversed Hoogsteen hydrogen bonding, between complementary nucleobases. For example, adenine and thymine are complementary nucleobases that pair through the formation of hydrogen bonds.

[0120] By “increases” is meant a positive alteration of at least 10%, 25%, 50%, 75%, or 100%.

[0121] The terms “inhibitor of base repair”, “base repair inhibitor”, “IBR” or their grammatical equivalents refer to a protein that is capable in inhibiting the activity of a nucleic acid repair enzyme, for example a base excision repair enzyme.

[0122] An “intein” is a fragment of a protein that is able to excise itself and join the remaining fragments (the exteins) with a peptide bond in a process known as protein splicing.

[0123] The terms “isolated,” “purified,” or “biologically pure” refer to material that is free to varying degrees from components which normally accompany it as found in its native state. “Isolate” denotes a degree of separation from original source or surroundings. “Purify” denotes a degree of separation that is higher than isolation. A “purified” or “biologically pure” protein is sufficiently free of other materials such that any impurities do not materially affect the biological properties of the protein or cause other adverse consequences. That is, a nucleic acid or peptide of this invention is purified if it is substantially free of cellular material, viral material, or culture medium when produced by recombinant DNA techniques, or chemical precursors or other chemicals when chemically synthesized. Purity and homogeneity are typically determined using analytical chemistry techniques, for example, polyacrylamide gel electrophoresis or high performance liquid chromatography. The term “purified” can denote that a nucleic acid or protein gives rise to essentially one band in an electrophoretic gel. For a protein that can be subjected to modifications, for example, phosphorylation or glycosylation, different modifications may give rise to different isolated proteins, which can be separately purified.

[0124] By “isolated polynucleotide” is meant a nucleic acid molecule that is free of the genes which, in the naturally-occurring genome of the organism from which the nucleic acid molecule of the invention is derived, flank the gene. The term therefore includes, for example, a recombinant DNA that is incorporated into a vector; into an autonomously replicating plasmid or virus; or into the genomic DNA of a prokaryote or eukaryote; or that exists as a separate molecule (for example, a cDNA or a genomic or cDNA fragment produced by PCR or restriction endonuclease digestion) independent of other sequences. In addition, the term includes an RNA molecule that is transcribed from a DNA molecule, as well as a recombinant DNA that is part of a hybrid gene encoding additional polypeptide sequence.

[0125] By an “isolated polypeptide” is meant a polypeptide of the invention that has been separated from components that naturally accompany it. Typically, the polypeptide is isolated when it is at least 60%, by weight, free from the proteins and naturally-occurring organic molecules with which it is naturally associated. Preferably, the preparation is at least 75%, more preferably at least 90%, and most preferably at least 99%, by weight, a polypeptide of the invention. An isolated polypeptide of the invention may be obtained, for example, by extraction from a natural source, by expression of a recombinant nucleic acid encoding such a polypeptide; or by chemically synthesizing the protein. Purity can be measured by any appropriate method, for example, column chromatography, polyacrylamide gel electrophoresis, or by HPLC analysis.

[0126] The term “linker”, as used herein, refers to a molecule that links two moieties. In one embodiment, the term “linker” refers to a covalent linker (e.g., covalent bond) or a non-covalent linker.

[0127] By “marker” is meant any protein or polynucleotide having an alteration in expression, level, structure or activity that is associated with a disease or disorder. In an embodiment, the marker is an accumulation of amyloid protein. In an embodiment, the marker is an alteration (e.g., mutation) in the sequence of a in transthyretin polypeptide and/or a transthyretin polynucleotide.

[0128] The term “mutation,” as used herein, refers to a substitution of a residue within a sequence, e.g., a nucleic acid or amino acid sequence, with another residue, or a deletion or insertion of one or more residues within a sequence. Mutations are typically described herein by identifying the original residue followed by the position of the residue within the sequence and by the identity of the newly substituted residue. Various methods for making the amino acid substitutions (mutations) provided herein are well known in the art, and are provided by, for example, Green and Sambrook, Molecular Cloning: A Laboratory Manual (4^{th} ed., Cold Spring Harbor Laboratory Press, Cold Spring Harbor, N.Y. (2012)).

[0129] The terms “nucleic acid” and “nucleic acid molecule,” as used herein, refer to a compound comprising a nucleobase and an acidic moiety, e.g., a nucleoside, a nucleotide, or a polymer of nucleotides. Typically, polymeric nucleic acids, e.g., nucleic acid molecules comprising three or more nucleotides are linear molecules, in which adjacent nucleotides are linked to each other via a phosphodiester linkage. In some embodiments, “nucleic acid” refers to individual nucleic acid residues (e.g. nucleotides and/or nucleosides). In some embodiments, “nucleic acid” refers to an oligonucleotide chain comprising three or more individual nucleotide residues. As used herein, the terms “oligonucleotide” and “polynucleotide” can be used interchangeably to refer to a polymer of nucleotides (e.g., a string of at least three nucleotides). In some embodiments, “nucleic acid” encompasses RNA as well as single and/or double-stranded DNA. Nucleic acids may be naturally occurring, for example, in the context of a genome, a transcript, an mRNA, tRNA, rRNA, siRNA, snRNA, a plasmid, cosmid, chromosome, chromatid, or other naturally occurring nucleic acid molecule. On the other hand, a nucleic acid molecule may be a non-naturally occurring molecule, e.g., a recombinant DNA or RNA, an artificial chromosome, an engineered genome, or fragment thereof, or a synthetic DNA, RNA, DNA/RNA hybrid, or including non-naturally occurring nucleotides or nucleosides. Furthermore, the terms “nucleic acid,” “DNA,” “RNA,” and/or similar terms include nucleic acid analogs, e.g., analogs having other than a phosphodiester backbone. Nucleic acids can be purified from natural sources, produced using recombinant expression systems and optionally purified, chemically synthesized, etc. Where appropriate, e.g., in the case of chemically synthesized molecules, nucleic acids can comprise nucleoside analogs such as analogs having chemically modified bases or sugars, and backbone modifications. A nucleic acid sequence is presented in the 5′ to 3′ direction unless otherwise indicated. In some embodiments, a nucleic acid is or comprises natural nucleosides (e.g. adenosine, thymidine, guanosine, cytidine, uridine, deoxyadenosine, deoxythymidine, deoxyguanosine, and deoxycytidine); nucleoside analogs (e.g., 2-aminoadenosine, 2-thiothymidine, inosine, pyrrolo-pyrimidine, 3-methyl adenosine, 5-methylcytidine, 2-aminoadenosine, C5-bromouridine, C5-fluorouridine, C5-iodouridine, C5-propynyl-uridine, C5-propynyl-cytidine, C5-methylcytidine, 2-aminoadenosine, 7-deazaadenosine, 7-deazaguanosine, 8-oxoadenosine, 8-oxoguanosine, O(6)-methylguanine, and 2-thiocytidine); chemically modified bases; biologically modified bases (e.g., methylated bases); intercalated bases; modified sugars (2′—e.g., fluororibose, ribose, 2′-deoxyribose, arabinose, and hexose); and/or modified phosphate groups (e.g., phosphorothioates and 5′-N-phosphoramidite linkages).

[0130] The term “nuclear localization sequence,” “nuclear localization signal,” or “NLS” refers to an amino acid sequence that promotes import of a protein into the cell nucleus. Nuclear localization sequences are known in the art and described, for example, in Plank et al., International PCT application, PCT/EP2000/011690, filed Nov. 23, 2000, published as WO/2001/038547 on May 31, 2001, the contents of which are incorporated herein by reference for their disclosure of exemplary nuclear localization sequences. In other embodiments, the NLS is an optimized NLS described, for example, by Koblan et al., Nature Biotech. 2018 doi:10.1038/nbt.4172. In some embodiments, anNLS comprises the amino acid sequence

(SEQ ID NO: 194)
KRTADGSEFESPKKKRKV,
(SEQ ID NO: 195)
KRPAATKKAGQAKKKK,
(SEQ ID NO: 196)
KKTELQTTNAENKTKKL,
(SEQ ID NO: 197)
KRGINDRNEWRGENGRKTR,
(SEQ ID NO: 198)
RKSGKIAAIVVKRPRK,
(SEQ ID NO: 199)
PKKKRKV,
or
(SEQ ID NO: 200)
MDSLLMNRRKFLYQFKNVRWAKGRRETYLC.

[0131] The term “nucleobase,” “nitrogenous base,” or “base,” used interchangeably herein, refers to a nitrogen-containing biological compound that forms a nucleoside, which in turn is a component of a nucleotide. The ability of nucleobases to form base pairs and to stack one upon another leads directly to long-chain helical structures such as ribonucleic acid (RNA) and deoxyribonucleic acid (DNA). Five nucleobases—adenine (A), cytosine (C), guanine (G), thymine (T), and uracil (U) —are called primary or canonical. Adenine and guanine are derived from purine, and cytosine, uracil, and thymine are derived from pyrimidine. DNA and RNA can also contain other (non-primary) bases that are modified. Non-limiting exemplary modified nucleobases can include hypoxanthine, xanthine, 7-methylguanine, 5,6-dihydrouracil, 5-methylcytosine (m5C), and 5-hydromethylcytosine. Hypoxanthine and xanthine can be created through mutagen presence, both of them through deamination (replacement of the amine group with a carbonyl group). Hypoxanthine can be modified from adenine. Xanthine can be modified from guanine. Uracil can result from deamination of cytosine. A “nucleoside” consists of a nucleobase and a five carbon sugar (either ribose or deoxyribose). Examples of a nucleoside include adenosine, guanosine, uridine, cytidine, 5-methyluridine (m5U), deoxyadenosine, deoxyguanosine, thymidine, deoxyuridine, and deoxycytidine. Examples of a nucleoside with a modified nucleobase includes inosine (I), xanthosine (X), 7-methylguanosine (m7G), dihydrouridine (D), 5-methylcytidine (m5C), and pseudouridine (Ψ). A “nucleotide” consists of a nucleobase, a five carbon sugar (either ribose or deoxyribose), and at least one phosphate group. Non-limiting examples of modified nucleobases and/or chemical modifications that a modified nucleobase may include are the following: pseudo-uridine, 5-Methyl-cytosine, 2′-O-methyl-3′-phosphonoacetate, 2′-O-methyl thioPACE (MSP), 2′-O-methyl-PACE (MP), 2′-fluoro RNA (2′-F-RNA), constrained ethyl (S-cEt), 2′-O-methyl (‘M’), 2′-O-methyl-3′-phosphorothioate (‘MS’), 2′-O-methyl-3′-thiophosphonoacetate (‘MSP’), 5-methoxyuridine, phosphorothioate, and N1-Methylpseudouridine.

[0132] The term “nucleic acid programmable DNA binding protein” or “napDNAbp” may be used interchangeably with “polynucleotide programmable nucleotide binding domain” to refer to a protein that associates with a nucleic acid (e.g., DNA or RNA), such as a guide nucleic acid or guide polynucleotide (e.g., gRNA), that guides the napDNAbp to a specific nucleic acid sequence. In some embodiments, the polynucleotide programmable nucleotide binding domain is a polynucleotide programmable DNA binding domain. In some embodiments, the polynucleotide programmable nucleotide binding domain is a polynucleotide programmable RNA binding domain. In some embodiments, the polynucleotide programmable nucleotide binding domain is a Cas9 protein. A Cas9 protein can associate with a guide RNA that guides the Cas9 protein to a specific DNA sequence that is complementary to the guide RNA. In some embodiments, the napDNAbp is a Cas9 domain, for example a nuclease active Cas9, a Cas9 nickase (nCas9), or a nuclease inactive Cas9 (dCas9). Non-limiting examples of nucleic acid programmable DNA binding proteins include, Cas9 (e.g., dCas9 and nCas9), Cas12a/Cpf1, Cas12b/C2c1, Cas12c/C2c3, Cas12d/CasY, Cas12e/CasX, Cas12g, Cas12h, Cas12i, and Cas12j/CasΦ (Cas12j/Casphi). Non-limiting examples of Cas enzymes include Cas1, Cas1B, Cas2, Cas3, Cas4, Cas5, Cas5d, Cas5t, Cas5h, Cas5a, Cas6, Cas7, Cas8, Cas8a, Cas8b, Cas8c, Cas9 (also known as Csn1 or Csx12), Cas10, Cas10d, Cas12a/Cpf1, Cas12b/C2c1, Cas12c/C2c3, Cas12d/CasY, Cas12e/CasX, Cas12g, Cas12h, Cas12i, Cas12j/CasΦ, Cpf1, Csy1, Csy2, Csy3, Csy4, Cse1, Cse2, Cse3, Cse4, Cse5e, Csc1, Csc2, Csa5, Csn1, Csn2, Csm1, Csm2, Csm3, Csm4, Csm5, Csm6, Cmr1, Cmr3, Cmr4, Cmr5, Cmr6, Csb1, Csb2, Csb3, Csx17, Csx14, Csx10, Csx16, CsaX, Csx3, Csx1, Csx1S, Csx11, Csf1, Csf2, CsO, Csf4, Csd1, Csd2, Cst1, Cst2, Csh1, Csh2, Csa1, Csa2, Csa3, Csa4, Csa5, Type II Cas effector proteins, Type V Cas effector proteins, Type VI Cas effector proteins, CARF, DinG, homologues thereof, or modified or engineered versions thereof. Other nucleic acid programmable DNA binding proteins are also within the scope of this disclosure, although they may not be specifically listed in this disclosure. See, e.g., Makarova et al. “Classification and Nomenclature of CRISPR-Cas Systems: Where from Here?” CRISPR J. 2018 October; 1:325-336. doi: 10.1089/crispr.2018.0033; Yan et al., “Functionally diverse type V CRISPR-Cas systems” Science. 2019 Jan. 4; 363(6422):88-91. doi: 10.1126/science.aav7271, the entire contents of each are hereby incorporated by reference. Exemplary nucleic acid programmable DNA binding proteins and nucleic acid sequences encoding nucleic acid programmable DNA binding proteins are provided in the Sequence Listing as SEQ ID NOs: 201-234 and 383.

[0133] The terms “nucleobase editing domain” or “nucleobase editing protein,” as used herein, refers to a protein or enzyme that can catalyze a nucleobase modification in RNA or DNA, such as cytosine (or cytidine) to uracil (or uridine) or thymine (or thymidine), and adenine (or adenosine) to hypoxanthine (or inosine) deaminations, as well as non-templated nucleotide additions and insertions. In some embodiments, the nucleobase editing domain is a deaminase domain (e.g., an adenine deaminase or an adenosine deaminase; or a cytidine deaminase or a cytosine deaminase).

[0134] As used herein, “obtaining” as in “obtaining an agent” includes synthesizing, purchasing, or otherwise acquiring the agent.

[0135] By “subject” is meant a mammal, including, but not limited to, a human or non-human mammal, such as a bovine, equine, canine, ovine, rodent, or feline. In an embodiment, a “patient” or “subject” as used herein refers to a mammalian subject or individual diagnosed with, at risk of having or developing, or suspected of having or developing a disease or a disorder. In some embodiments, the term “patient” refers to a mammalian subject with a higher than average likelihood of developing a disease or a disorder. Exemplary patients can be humans, non-human primates, cats, dogs, pigs, cattle, cats, horses, camels, llamas, goats, sheep, rodents (e.g., mice, rabbits, rats, or guinea pigs) and other mammalians that can benefit from the therapies disclosed herein. Exemplary human patients can be male and/or female.

[0136] “Patient in need thereof” or “subject in need thereof” is referred to herein as a patient diagnosed with, at risk or having, predetermined to have, or suspected of having a disease or disorder.

[0137] The terms “pathogenic mutation”, “pathogenic variant”, “disease casing mutation”, “disease causing variant”, “deleterious mutation”, or “predisposing mutation” refers to a genetic alteration or mutation that is associated with a disease or disorder that increases an individual's susceptibility or predisposition to a certain disease or disorder. In some embodiments, the pathogenic mutation comprises at least one wild-type amino acid substituted by at least one pathogenic amino acid in a protein encoded by a gene. In some embodiments, the pathogenic mutation is in a terminating region (e.g., stop codon). In some embodiments, the pathogenic mutation is in a non-coding region (e.g., intron, promoter, etc.)

[0138] The terms “protein”, “peptide”, “polypeptide”, and their grammatical equivalents are used interchangeably herein, and refer to a polymer of amino acid residues linked together by peptide (amide) bonds. A protein, peptide, or polypeptide can be naturally occurring, recombinant, or synthetic, or any combination thereof.

[0139] The term “fusion protein” as used herein refers to a hybrid polypeptide which comprises protein domains from at least two different proteins.

[0140] The term “recombinant” as used herein in the context of proteins or nucleic acids refers to proteins or nucleic acids that do not occur in nature, but are the product of human engineering. For example, in some embodiments, a recombinant protein or nucleic acid molecule comprises an amino acid or nucleotide sequence that comprises at least one, at least two, at least three, at least four, at least five, at least six, or at least seven mutations as compared to any naturally occurring sequence.

[0141] By “reduces” is meant a negative alteration of at least 10%, 25%, 50%, 75%, or 100%.

[0142] By “reference” is meant a standard or control condition. In one embodiment, the reference is a wild-type or healthy cell. In other embodiments and without limitation, a reference is an untreated cell that is not subjected to a test condition, or is subjected to placebo or normal saline, medium, buffer, and/or a control vector that does not harbor a polynucleotide of interest. The reference can be a cell or subject with a pathogenic mutation in a transthyretin (TTR) polynucleotide sequence and/or a transthyretin (TTR) polypeptide sequence. A reference can be a subject or cell with an amyloidosis (e.g., a transthyretin amyloidosis) or a subject or cell without an amyloidosis.

[0143] A “reference sequence” is a defined sequence used as a basis for sequence comparison. A reference sequence may be a subset of or the entirety of a specified sequence; for example, a segment of a full-length cDNA or gene sequence, or the complete cDNA or gene sequence. For polypeptides, the length of the reference polypeptide sequence will generally be at least about 16 amino acids, at least about 20 amino acids, at least about 25 amino acids, about 35 amino acids, about 50 amino acids, or about 100 amino acids. For nucleic acids, the length of the reference nucleic acid sequence will generally be at least about 50 nucleotides, at least about 60 nucleotides, at least about 75 nucleotides, about 100 nucleotides or about 300 nucleotides or any integer thereabout or therebetween. In some embodiments, a reference sequence is a wild-type sequence of a protein of interest. In other embodiments, a reference sequence is a polynucleotide sequence encoding a wild-type protein.

[0144] The term “RNA-programmable nuclease,” and “RNA-guided nuclease” are used with one or more RNA(s) that is not a target for cleavage. In some embodiments, an RNA-programmable nuclease, when in a complex with an RNA, may be referred to as a nuclease-RNA complex (alternatively, as a nuclease_RNA complex). Typically, the bound RNA(s) is referred to as a guide RNA (gRNA). In some embodiments, the RNA-programmable nuclease is the (CRISPR-associated system) Cas9 endonuclease, for example, Cas9 (Csn1) from Streptococcus pyogenes (e.g., SEQ ID NO: 201), Cas9 from Neisseria meningitidis (NmeCas9; SEQ ID NO: 212), Nme2Cas9 (SEQ ID NO: 213), or derivatives thereof (e.g. a sequence with at least about 85% sequence identity to a Cas9, such as Nme2Cas9 or spCas9).

[0145] The term “single nucleotide polymorphism (SNP)” is a variation in a single nucleotide that occurs at a specific position in the genome, where each variation is present to some appreciable degree within a population (e.g., >1%).

[0146] By “specifically binds” is meant a nucleic acid molecule, polypeptide, polypeptide/polynucleotide complex, compound, or molecule that recognizes and binds a polypeptide and/or nucleic acid molecule of the invention, but which does not substantially recognize and bind other molecules in a sample, for example, a biological sample.

[0147] By “substantially identical” is meant a polypeptide or nucleic acid molecule exhibiting at least 50% identity to a reference amino acid sequence. In one embodiment, a reference sequence is a wild-type amino acid or nucleic acid sequence. In another embodiment, a reference sequence is any one of the amino acid or nucleic acid sequences described herein. In one embodiment, such a sequence is at least 60%, 80%, 85%, 90%, 95% or even 99% identical at the amino acid level or nucleic acid level to the sequence used for comparison.

[0148] Sequence identity is typically measured using sequence analysis software (for example, Sequence Analysis Software Package of the Genetics Computer Group, University of Wisconsin Biotechnology Center, 1710 University Avenue, Madison, Wis. 53705, BLAST, BESTFIT, GAP, or PILEUP/PRETTYBOX programs). Such software matches identical or similar sequences by assigning degrees of homology to various substitutions, deletions, and/or other modifications. Conservative substitutions typically include substitutions within the following groups: glycine, alanine; valine, isoleucine, leucine; aspartic acid, glutamic acid, asparagine, glutamine; serine, threonine; lysine, arginine; and phenylalanine, tyrosine. In an exemplary approach to determining the degree of identity, a BLAST program may be used, with a probability score between e⁻³ and e⁻¹⁰⁰ indicating a closely related sequence. COBALT is used, for example, with the following parameters:
[0149] a) alignment parameters: Gap penalties-11,-1 and End-Gap penalties-5,-1,
[0150] b) CDD Parameters: Use RPS BLAST on; Blast E-value 0.003; Find Conserved columns and Recompute on, and
[0151] c) Query Clustering Parameters: Use query clusters on; Word Size 4; Max cluster distance 0.8; Alphabet Regular.
   EMBOSS Needle is used, for example, with the following parameters:
[0152] a) Matrix: BLOSUM62;
[0153] b) GAP OPEN: 10;
[0154] c) GAP EXTEND: 0.5;
[0155] d) OUTPUT FORMAT: pair;
[0156] e) END GAP PENALTY: false;
[0157] f) END GAP OPEN: 10; and
[0158] g) END GAP EXTEND: 0.5.

[0159] Nucleic acid molecules useful in the methods of the invention include any nucleic acid molecule that encodes a polypeptide of the invention or a fragment thereof. Such nucleic acid molecules need not be 100% identical with an endogenous nucleic acid sequence, but will typically exhibit substantial identity. Polynucleotides having “substantial identity” to an endogenous sequence are typically capable of hybridizing with at least one strand of a double-stranded nucleic acid molecule. Nucleic acid molecules useful in the methods of the invention include any nucleic acid molecule that encodes a polypeptide of the invention or a fragment thereof. Such nucleic acid molecules need not be 100% identical with an endogenous nucleic acid sequence, but will typically exhibit substantial identity. Polynucleotides having “substantial identity” to an endogenous sequence are typically capable of hybridizing with at least one strand of a double-stranded nucleic acid molecule. By “hybridize” is meant pair to form a double-stranded molecule between complementary polynucleotide sequences (e.g., a gene described herein), or portions thereof, under various conditions of stringency. (See, e.g., Wahl, G. M. and S. L. Berger (1987) Methods Enzymol. 152:399; Kimmel, A. R. (1987) Methods Enzymol. 152:507).

[0160] For example, stringent salt concentration will ordinarily be less than about 750 mM NaCl and 75 mM trisodium citrate, preferably less than about 500 mM NaCl and 50 mM trisodium citrate, and more preferably less than about 250 mM NaCl and 25 mM trisodium citrate. Low stringency hybridization can be obtained in the absence of organic solvent, e.g., formamide, while high stringency hybridization can be obtained in the presence of at least about 35% formamide, and more preferably at least about 50% formamide. Stringent temperature conditions will ordinarily include temperatures of at least about 30° C., more preferably of at least about 370° C., and most preferably of at least about 420° C. Varying additional parameters, such as hybridization time, the concentration of detergent, e.g., sodium dodecyl sulfate (SDS), and the inclusion or exclusion of carrier DNA, are well known to those skilled in the art. Various levels of stringency are accomplished by combining these various conditions as needed. In a preferred: embodiment, hybridization will occur at 300° C. in 750 mM NaCl, 75 mM trisodium citrate, and 10% SDS. In a more preferred embodiment, hybridization will occur at 370° C. in 500 mM NaCl, 50 mM trisodium citrate, 1% SDS, 35% formamide, and 100 μg/ml denatured salmon sperm DNA (ssDNA). In a most preferred embodiment, hybridization will occur at 420° C. in 250 mM NaCl, 25 mM trisodium citrate, 1% SDS, 50% formamide, and 200 μg/ml ssDNA. Useful variations on these conditions will be readily apparent to those skilled in the art.

[0161] For most applications, washing steps that follow hybridization will also vary in stringency. Wash stringency conditions can be defined by salt concentration and by temperature. As above, wash stringency can be increased by decreasing salt concentration or by increasing temperature. For example, stringent salt concentration for the wash steps will preferably be less than about 30 mM NaCl and 3 mM trisodium citrate, and most preferably less than about 15 mM NaCl and 1.5 mM trisodium citrate. Stringent temperature conditions for the wash steps will ordinarily include a temperature of at least about 25° C., more preferably of at least about 42° C., and even more preferably of at least about 68° C. In an embodiment, wash steps will occur at 25° C. in 30 mM NaCl, 3 mM trisodium citrate, and 0.1% SDS. In another embodiment, wash steps will occur at 42 C in 15 mM NaCl, 1.5 mM trisodium citrate, and 0.1% SDS. In a more preferred embodiment, wash steps will occur at 680° C. in 15 mM NaCl, 1.5 mM trisodium citrate, and 0.1% SDS. Additional variations on these conditions will be readily apparent to those skilled in the art. Hybridization techniques are well known to those skilled in the art and are described, for example, in Benton and Davis (Science 196:180, 1977); Grunstein and Hogness (Proc. Natl. Acad. Sci., USA 72:3961, 1975); Ausubel et al. (Current Protocols in Molecular Biology, Wiley Interscience, New York, 2001); Berger and Kimmel (Guide to Molecular Cloning Techniques, 1987, Academic Press, New York); and Sambrook et al., Molecular Cloning: A Laboratory Manual, Cold Spring Harbor Laboratory Press, New York.

[0162] By “split” is meant divided into two or more fragments.

[0163] A “split Cas9 protein” or “split Cas9” refers to a Cas9 protein that is provided as an N-terminal fragment and a C-terminal fragment encoded by two separate nucleotide sequences. The polypeptides corresponding to the N-terminal portion and the C-terminal portion of the Cas9 protein may be spliced to form a “reconstituted” Cas9 protein.

[0164] The term “target site” refers to a sequence within a nucleic acid molecule that ismodified. In embodiments, the modification is deamination of a base. The deaminase can be a cytidine or an adenine deaminase. The fusion protein or base editing complex comprising a deaminase may comprise a dCas9-adenosine deaminase fusion protein, a Cas12b-adenosine deaminase fusion, or a base editor disclosed herein.

[0165] As used herein, the terms “treat,” treating,” “treatment,” and the like refer to reducing or ameliorating a disorder and/or symptoms associated therewith or obtaining a desired pharmacologic and/or physiologic effect. It will be appreciated that, although not precluded, treating a disorder or condition does not require that the disorder, condition or symptoms associated therewith be completely eliminated. In some embodiments, the effect is therapeutic, i.e., without limitation, the effect partially or completely reduces, diminishes, abrogates, abates, alleviates, decreases the intensity of, or cures a disease and/or adverse symptom attributable to the disease. In some embodiments, the effect is preventative, i.e., the effect protects or prevents an occurrence or reoccurrence of a disease or condition. To this end, the presently disclosed methods comprise administering a therapeutically effective amount of a compositions as described herein.

[0166] By “uracil glycosylase inhibitor” or “UGI” is meant an agent that inhibits the uracil-excision repair system. Base editors comprising a cytidine deaminase convert cytosine to uracil, which is then converted to thymine through DNA replication or repair. Including an inhibitor of uracil DNA glycosylase (UGI) in the base editor prevents base excision repair which changes the U back to a C. An exemplary UGI comprises an amino acid sequence as follows: >splP14739IUNGI_BPPB2 Uracil-DNA glycosylase inhibitor

(SEQ ID NO: 235)
MTNLSDIIEKETGKQLVIQESILMLPEEVEEVIGNKPESDILVHTAYDES
TDENVMLLTSDAPEYKPWALVIQDSNGENKIKML.

[0167] Ranges provided herein are understood to be shorthand for all of the values within the range. For example, a range of 1 to 50 is understood to include any number, combination of numbers, or sub-range from the group consisting 1, 2, 3, 4, 5, 6, 7, 8, 9, 10, 11, 12, 13, 14, 15, 16, 17, 18, 19, 20, 21, 22, 23, 24, 25, 26, 27, 28, 29, 30, 31, 32, 33, 34, 35, 36, 37, 38, 39, 40, 41, 42, 43, 44, 45, 46, 47, 48, 49, or 50.

[0168] The recitation of a listing of chemical groups in any definition of a variable herein includes definitions of that variable as any single group or combination of listed groups. The recitation of an embodiment for a variable or aspect herein includes that embodiment as any single embodiment or in combination with any other embodiments or portions thereof.

[0169] All terms are intended to be understood as they would be understood by a person skilled in the art. Unless defined otherwise, all technical and scientific terms used herein have the same meaning as commonly understood by one of ordinary skill in the art to which the disclosure pertains

[0170] In this application, the use of the singular includes the plural unless specifically stated otherwise. It must be noted that, as used in the specification, the singular forms “a,” “an” and “the” include plural referents unless the context clearly dictates otherwise. In this application, the use of “or” means “and/or” unless stated otherwise. Furthermore, use of the term “including” as well as other forms, such as “include”, “includes,” and “included,” is not limiting.

[0171] As used in this specification and claim(s), the words “comprising” (and any form of comprising, such as “comprise” and “comprises”), “having” (and any form of having, such as “have” and “has”), “including” (and any form of including, such as “includes” and “include”) or “containing” (and any form of containing, such as “contains” and “contain”) are inclusive or open-ended and do not exclude additional, unrecited elements or method steps. Any embodiments specified as “comprising” a particular component(s) or element(s) are also contemplated as “consisting of” or “consisting essentially of” the particular component(s) or element(s) in some embodiments. It is contemplated that any embodiment discussed in this specification can be implemented with respect to any method or composition of the present disclosure, and vice versa. Furthermore, compositions of the present disclosure can be used to achieve methods of the present disclosure.

[0172] The term “about” or “approximately” means within an acceptable error range for the particular value as determined by one of ordinary skill in the art, which will depend in part on how the value is measured or determined, i.e., the limitations of the measurement system. For example, “about” can mean within 1 or more than 1 standard deviation, per the practice in the art. Alternatively, “about” can mean a range of up to 20%, up to 10%, up to 5%, or up to 1% of a given value. Alternatively, particularly with respect to biological systems or processes, the term can mean within an order of magnitude, e.g., within 5-fold, within 2-fold of a value. Where particular values are described in the application and claims, unless otherwise stated, the term “about” means within an acceptable error range for the particular value should be assumed.

[0173] Reference in the specification to “some embodiments,” “an embodiment,” “one embodiment” or “other embodiments” means that a particular feature, structure, or characteristic described in connection with the embodiments is included in at least some embodiments, but not necessarily all embodiments, of the present disclosures.

### BRIEF DESCRIPTION OF THE DRAWINGS

[0174] FIGS. 1A-1C are plots showing base editing efficiency for base editor systems comprising the indicated base editors in combination with the indicated guide RNAs targeting a transthyretin (TTR) polynucleotide. FIG. 1A is a plot of A>G base editing efficiencies at a conserved splice site motif using the indicated base editors and guides. FIG. 1B is a plot of C>T base editing efficiencies in a splice site motif using the indicated base editors and guides. FIG. 1C is a plot of indel editing efficiencies.

[0175] FIG. 2 is a plot showing editing efficiency for a bhCas12b endonuclease used in combination with the indicated guide RNAs targeting a transthyretin (TTR) polynucleotide.

[0176] FIG. 3 provides a bar graph showing human TTR protein concentrations measured by ELISA in PXB-cell hepatocytes prior to transfection. Each condition was run in triplicate, as represented by each dot in the assay. Bar graphs illustrate the mean TTR protein concentrations and error bars indicate the standard deviation.

[0177] FIG. 4 provides a combined bar graph and plot showing editing rates in PXB-cell hepatocytes at the targeted site assessed at 13 days post-transfection by NGS (squares, right axis), and human TTR protein concentrations assessed 7 days post-transfection by ELISA (bars, left axis). Each condition was run in triplicate, as represented by each dot. In FIG. 4, the dotted line indicates the average human TTR concentration in cells edited using the base editing system ABE8.8_sgRNA_088. The starred sample (Cas9_gRNA991*) indicates that maximum indel rate within the protospacer region was measured, rather than rate of target base-editing.

[0178] FIG. 5 provides a combined bar graph and plot showing Editing rates in PXB-cell hepatocytes at the targeted site assessed at 13 days post-transfection by NGS (squares, right axis), and human TTR protein concentrations assessed 13 days post-transfection by ELISA (bars, left axis). Each condition was run in triplicate, as represented by each dot. In FIG. 5. The dotted line indicates the average human TTR concentration in cells edited using the base editing system ABE8.8_sgRNA_088. Starred sample indicates that maximum indel rate within the protospacer region was measured, rather than rate of target base-editing.

[0179] FIG. 6 provides a bar graph showing cyno TTR protein concentrations measured by ELISA in primary cyno hepatocyte co-culture supernatants prior to transfection. Each condition was run in triplicate, as represented by each dot in the assay. The bars illustrate the mean TTR protein concentrations and error bars indicate the standard deviation.

[0180] FIG. 7 provides a combined bar graph and plot showing editing rates in primary cyno hepatocyte co-cultures at the targeted site assessed at 13 days post-transfection by NGS (squares, right axis), and cyno TTR protein concentrations assessed 7 days post-transfection by ELISA (bars, left axis). Each condition was run in triplicate, as represented by each dot in the graph. The dotted line indicates the average cyno TTR concentration in cells edited using a base editing system including ABE8.8_sgRNA_088.

[0181] FIG. 8 provides a combined bar graph and plot showing editing rates in primary cyno hepatocyte co-cultures at the targeted site assessed at 13 days post-transfection by NGS (squares, right axis), and cyno TTR protein concentrations assessed 13 days post-transfection by ELISA (bars, left axis). Each condition was run in triplicate, as represented by each dot in the graph. The dotted line indicates the average cyno TTR concentration in cells edited using the base editing system ABE8.8_sgRNA_088.

[0182] FIGS. 9A and 9B present schematics showing the TTR promoter sequence aligned to gRNAs designed for a screen. In FIG. 9A, The gRNAs are shown above or below the sequence shown in the figure depending on their strand orientation. In each of FIGS. 9A and 9B, the gRNA protospacer sequence plus PAM sequence is shown in each annotation. The nucleotide sequence shown in FIGS. 9A and 9B is provided in the sequence listing as SEQ ID NO: 547 and the amino acid sequence shown in FIG. 9 is provided in the sequence listing as SEQ ID NO: 548.

[0183] FIG. 10 provides a bar graph showing next-generation sequencing (NGS) data from three replicates of HepG2 cells transfected with mRNA encoding the indicated editor (indicated above the bars) and gRNA encoding the indicated gRNA (indicated along the x-axis). Dots represent individual data points for each edit type (i.e., indel, max. A-to-G, max. C-to-T) shown. Max A-to-G or max. C-to-T reflects the highest editing frequency for any A or C base within the gRNA protospacer. Three replicates were performed on the same day.

[0184] FIG. 11 provides a bar graph showing TTR knockdown data. Individual data points for 2 replicates of TTR expression data are plotted. Three technical replicates for each data point for the RT-qPCR were performed and the mean is plotted for 2 biological data points. All data are from transfections were performed on the same day. RT-qPCR analysis was performed relative to untreated controls in the same RT-qPCR plate as the test well. ACTB was used as an internal control for each sample. Untreated cells had a different TTR:ACTB ratio than transfected cells, which led to artificially reduced relative TTR expression (0.30-0.42) in cells transfected with negative control catalytically dead Cas9 editor or gRNA that would not affect TTR expression.

[0185] FIGS. 12A and 12B provide a schematics showing the location of promoter tiling gRNAs effective in a TTR RT-qPCR knockdown assay. All gRNAs that demonstrated comparable or improved TTR knockdown as compared with a nuclease approach are shown. Five highly effective gRNAs, as measured by TTR RT-qPCR, were gRNA1756 ABE, gRNA1764 ABE, gRNA1790 CBE, gRNA1786 ABE, and gRNA1772 ABE. A few gRNAs that lowered TTR transcript levels overlapped with putative functional elements including a putative TATA box (transcription initiation site) and a start codon (translation initiation site) as indicated in FIGS. 12A and 12B. In FIGS. 12A and 12B, * indicates the gRNA was highly effective when paired with either an ABE or CBE; ** indicates editing frequency was <50% for this gRNA, not intending to be bound by theory, this could indicate that the gRNA was acting though a mechanism distinct from or in addition to base editing; and *** indicates both that the gRNA was highly effective when paired with either an ABE or CBE and that editing frequency was <50% for this gRNA. In FIG. 12B, five potent gRNA's, as measured by TTR RT-qPCR, are shown in white (gRNA1756 ABE, gRNA1764 ABE, gRNA1790 CBE, gRNA1786 ABE, and gRNA1772 ABE). The nucleotide sequence shown in FIG. 12A is provided in the sequence listing as SEQ ID NO: 549 and the amino acid sequence shown in FIG. 12A is provided in the sequence listing as SEQ ID NO: 550. The nucleotide sequence shown in FIG. 12B corresponds to SEQ ID NO: 1160.

[0186] FIG. 13 provides a bar graph showing editing rates at the targeted sites assessed at 72 hours post-transfection by NGS. Each experimental condition was run in triplicate and is displayed as an average with standard error of the mean. Total splice site disruption without unintended in-gene edits is shown as the left bar of each pair of bars, and unintended edits are shown as the right bar of each pair of bars. The total editing by the gRNA991 spCas9 control is displayed as the left bar for the “gRNA991+spCas9” sample.

### DETAILED DESCRIPTION OF THE INVENTION

[0187] The invention features compositions and methods for editing a transthyretin polynucleotide sequence to treat transthyretin amyloidosis.

[0188] The invention is based, at least in part, on the discovery that editing can be used to disrupt expression of a transthyretin polypeptide or to edit a pathogenic mutation in a transthyretin polypeptide. In one particular embodiment, the invention provides guide RNA sequences that are effective for use in conjunction with a base editing system for editing a transthyretin (TTR) gene sequence to disrupt splicing or correct a pathogenic mutation. In another embodiment, the invention provides guide RNA sequences that target a Cas12b nuclease to edit a TTR gene sequence, thereby disrupting TTR polypeptide expression.

[0189] Accordingly, the invention provides guide RNA sequences suitable for use with ABE and/or BE4 for transthyretin (TTR) gene splice site disruption and guide RNA sequences suitable for use with bhCas12b nucleases for disruption of the transthyretin (TTR) gene. In embodiments, the compositions and methods of the present invention can be used for editing a TTR gene in a hepatocyte. The methods provided herein can include reducing or eliminating expression of TTR in a hepatocyte cell to treat an amyloidosis.

### Amyloidosis

[0190] Amyloidosis is a disorder that involved extracellular deposition of amyloid in an organ or tissue (e.g., the liver). Amyloidosis can occur when mutant transthyretin polypeptides aggregate (e.g., as fibrils). An amyloidosis caused by a mutation to the transthyretin gene can be referred to as a “transthyretin amyloidosis”. Some forms of transthyretin amyloidosis are not associated with a mutation to the transthyretin gene. Non-limiting examples of mutations to the mature transthyretin (TTR) protein that can lead to amyloidosis include the alterations T60A, V30M, V30A, V30G, V30L, V122I, V122A, and V122(−). One method for treatment of transthyretin amyloidosis includes disrupting expression or activity of transthyretin in a cell of a subject, optionally a hepatocyte cell. Accordingly, provided herein are methods for reducing or eliminating expression of transthyretin in a cell. The transthyretin in the cell can be a pathogenic variant. Expression of transthyretin in a cell can be disrupted by disrupting splicing of a transthyretin transcript.

### Transthyretin Amyloidosis

[0191] Transthyretin amyloidosis is a progressive condition characterized by the buildup of protein deposits in organs and/or tissues. These protein deposits can occur in the peripheral nervous system, which is made up of nerves connecting the brain and spinal cord to muscles and sensory cells that detect sensations such as touch, pain, heat, and sound. Protein deposits in these nerves result in a loss of sensation in the extremities (peripheral neuropathy). The autonomic nervous system, which controls involuntary body functions such as blood pressure, heart rate, and digestion, may also be affected by amyloidosis. In some cases, the brain and spinal cord (i.e., central nervous system) are affected. Other areas of amyloidosis include the heart, kidneys, eyes, liver, and gastrointestinal tract. The age at which symptoms begin to develop can be between the ages of 20 and 70.

[0192] There are three major forms of transthyretin amyloidosis, which are distinguished by their symptoms and the body systems they effect: neuropathic, leptomeningeal, and cardiac.

[0193] The neuropathic form of transthyretin amyloidosis primarily affects the peripheral and autonomic nervous systems, resulting in peripheral neuropathy and difficulty controlling bodily functions. Impairments in bodily functions can include sexual impotence, diarrhea, constipation, problems with urination, and a sharp drop in blood pressure upon standing (orthostatic hypotension). Some people experience heart and kidney problems as well. Various eye problems may occur, such as cloudiness of the clear gel that fills the eyeball (vitreous opacity), dry eyes, increased pressure in the eyes (glaucoma), or pupils with an irregular or “scallope”d appearance. Some people with this form of transthyretin amyloidosis develop carpal tunnel syndrome, which can involve numbness, tingling, and weakness in the hands and fingers.

[0194] The leptomeningeal form of transthyretin amyloidosis primarily affects the central nervous system. In people with this form, amyloidosis occurs in the leptomeninges, which are two thin layers of tissue that cover the brain and spinal cord. A buildup of protein in this tissue can cause stroke and bleeding in the brain, an accumulation of fluid in the brain (hydrocephalus), difficulty coordinating movements (ataxia), muscle stiffness and weakness (spastic paralysis), seizures, and loss of intellectual function (dementia). Eye problems similar to those in the neuropathic form may also occur. When people with leptomeningeal transthyretin amyloidosis have associated eye problems, they are said to have the oculoleptomeningeal form.

[0195] The cardiac form of transthyretin amyloidosis affects the heart. People with cardiac amyloidosis may have an abnormal heartbeat (arrhythmia), an enlarged heart (cardiomegaly), or orthostatic hypertension. These abnormalities can lead to progressive heart failure and death. Occasionally, people with the cardiac form of transthyretin amyloidosis have mild peripheral neuropathy.

[0196] Mutations in the transthyretin (TTR) gene cause transthyretin amyloidosis. Transthyretin transports vitamin A (retinol) and a hormone called thyroxine throughout the body. Not being bound by theory, to transport retinol and thyroxine, transthyretin must form a tetramer. Transthyretin is produced primarily in the liver (i.e., in hepatic cells). A small amount of transthyretin (TTR) is produced in an area of the brain called the choroid plexus and in the retina.

[0197] TTR gene mutations can alter the structure of transthyretin, impairing its ability to bind to other transthyretin proteins. The TTR gene mutation can be autosomal dominant.

### Splice Sites

[0198] Gene splice sites and splice site motifs are well known in the art and it is within the skill of a practitioner to identify splice sites in sequence (see, e.g., Sheth, et al., “Comprehensive splice-site analysis using comparative genomics”, Nucleic Acids Research, 34:3955-3967 (2006); Dogan, et al., “AplicePort—an interactive splice-site analysis tool”, Nucleic Acids Research, 35:W285-W291 (2007); and Zuallaert, et al., “SpliceRover: interpretable convolutional neural networks for improved splice site prediction”, Bioinformatics, 34:4180-4188 (2018)).

### Editing of Target Genes

[0199] To edit the transthyretin (TTR) gene, a cell (e.g., a hepatocyte) is contacted with a guide RNA and a nucleobase editor polypeptide comprising a nucleic acid programmable DNA binding protein (napDNAbp) and a cytidine deaminase or adenosine deaminase to edit a base of a gene sequence. Editing of the base can result in disruption of a splice site (e.g, through alteration of a splice-site motif nucleobase). Editing of the base can result in replacement of a pathogenic variant amino acid with a non-pathogenic variant amino acid. As a non-limiting example, editing of the base can result in replacing a T60A, V30M, V30A, V30G, V30L, V122I, V122A, or a V122(−) alteration in the mature transthyretin (TTR) polypeptide with a non-pathogenic variant or the wild-type valine residue. The cytidine deaminase can be BE4 (e.g., saBE4). The adenosine deaminase can be ABE (e.g., saABE.8.8). In some embodiments, multiple target sites are edited simultaneously. In some embodiments, the TTR gene is edited by contacting a cell with a nuclease and a guide RNA to introduce an indel into a gene sequence. The indel can be associated with a reduction or elimination of expression of the gene. The nuclease can be Cas12b (e.g., bhCas12b). The cells can be edited in vivo or ex vivo. The guide RNA can be a single guide or a dual guide. In some embodiments, cells to be edited are contacted with at least one nucleic acid, wherein at least one nucleic acid encodes a guide RNA, or two or more guide RNAs, and a nucleobase editor polypeptide comprising a nucleic acid programmable DNA binding protein (napDNAbp) and a deaminase, e.g., an adenosine or a cytidine deaminase. In some embodiments, the gRNA comprises nucleotide analogs. These nucleotide analogs can inhibit degradation of the gRNA by cellular processes. Exemplary single guide RNA (sgRNA) sequences are provided in Table 1 and exemplary spacer sequences and target sequences are provided in Tables 2A, 2B, and 2C.

[0200] In various instances, it is advantageous for a spacer sequence to include a 5′ and/or a 3′ “G” nucleotide. In some cases, for example, any spacer sequence or guide polynucleotide provided herein comprises or further comprises a 5′ “G”, where, in some embodiments, the 5′ “G” is or is not complementary to a target sequence. In some embodiments, the 5′ “G” is added to a spacer sequence that does not already contain a 5′ “G.” For example, it can be advantageous for a guide RNA to include a 5′ terminal “G” when the guide RNA is expressed under the control of a U6 promoter or the like because the U6 promoter prefers a “G” at the transcription start site (see Cong, L. et al. “Multiplex genome engineering using CRISPR/Cas systems. Science 339:819-823 (2013) doi: 10.1126/science.1231143). In some cases, a 5′ terminal “G” is added to a guide polynucleotide that is to be expressed under the control of a promoter, but is optionally not added to the guide polynucleotide if or when the guide polynucleotide is not expressed under the control of a promoter.

[0201] Exemplary guide RNAs, spacer sequences, and target sequences are provided in the following Tables 1, 2A, 2B, and 2C.

[0202] In embodiments, a guide RNA comprises a sequence complementary to a promoter region of a TTR polynucleotide sequence. In embodiments, the promoter region spans from positions +10, +5, +1, −1, −2, −3, −4, −5, −6, −7, −8, −9, −10, −15, −20, −25, −30, −35, −40, −45, −50, −55, −60, −65, −70, −75, −80, −85, −90, −95, −100, −105, −110, −115, −120, −125, −130, −135, −140, −145, −150, −155, −160, −165, −170, −175, −180, −185, −190, −195, −200, −250, or −300 to position +5, +1, −1, −2, −3, −4, −5, −6, −7, −8, −9, −10, −15, −20, −25, −30, −35, −40, −45, −50, −55, −60, −65, −70, −75, −80, −85, −90, −95, −100, −105, −110, −115, −120, −125, −130, −135, −140, −145, −150, −155, −160, −165, −170, −175, −180, −185, −190, −195, −200, −250, −300, or −400, where position +1 corresponds to the first A of the start codon (ATG) of the TTR polynucleotide sequence.

TABLE 1
Guide RNAs for editing transthyretin (TTR) splice sites and/or introducing indels
into the TTR gene (e.g., using bhCas12b)

| | | SEQ ID |
|---|---|---|
| sgRNA ID | Sequence | NO |
| sgRNA_361 | mUsmAsmUsAGGAAAACCAGTGAGTCGUUUUAGAGCUAGAAAUA | 394 |
| | GCAAGUUAAAAUAAGGCUAGUCCGUUAUCAACUUGAAAAAGUGG | |
| | CACCGAGUCGGUGCmUsmUsmUsU | |
| sgRNA_362 | mUsmAsmCsUCACCUCUGCAUGCUCAGUUUUAGAGCUAGAAAUA | 395 |
| | GCAAGUUAAAAUAAGGCUAGUCCGUUAUCAACUUGAAAAAGUGG | |
| | CACCGAGUCGGUGCmUsmUsmUsU | |
| sgRNA_363 | mAsmCsmUsCACCUCUGCAUGCUCAUGUUUUAGAGCUAGAAAUA | 396 |
| | GCAAGUUAAAAUAAGGCUAGUCCGUUAUCAACUUGAAAAAGUGG | |
| | CACCGAGUCGGUGCmUsmUsmUsU | |
| sgRNA_364 | mUsmAsmCsCACCUAUGAGAGAAGACGUUUUAGAGCUAGAAAUA | 397 |
| | GCAAGUUAAAAUAAGGCUAGUCCGUUAUCAACUUGAAAAAGUGG | |
| | CACCGAGUCGGUGCmUsmUsmUsU | |
| sgRNA_365 | mAsmUsmAsCUCACCUCUGCAUGCUCAGUUUUAGUACUCUGUAA | 398 |
| | UGAAAAUUACAGAAUCUACUAAAACAAGGCAAAAUGCCGUGUUU | |
| | AUCUCGUCAACUUGUUGGCGAGAmUsmUsmUsU | |
| sgRNA_366 | mAsmCsmUsGGUUUUCCUAUAAGGUGUGUUUUAGUACUCUGUAA | 399 |
| | UGAAAAUUACAGAAUCUACUAAAACAAGGCAAAAUGCCGUGUUU | |
| | AUCUCGUCAACUUGUUGGCGAGAmUsmUsmUsU | |
| sgRNA_367 | mGsmUsmUsCUGUCUUUUGGUCAGGACAACCGUCUAGCUAUAAG | 400 |
| | UGCUGCAGGGUGUGAGAAACUCCUAUUGCUGGACGAUGUCUCUU | |
| | ACGAGGCAUUAGCACUUGGCAGGAUGGCUUCUCmAsmUsmCsG | |
| sgRNA_368 | mGsmUsmUsCUGUCUUUUGGUCAGGACAACCGUCUAGCUAUAAG | 401 |
| | UGCUGCAGGGUGUGAGAAACUCCUAUUGCUGGACGAUGUCUCUU | |
| | ACGAGGCAUUAGCACUCCUAUAAGGUGUGAAAGmUsmCsmUsG | |
| sgRNA_369 | mGsmUsmUsCUGUCUUUUGGUCAGGACAACCGUCUAGCUAUAAG | 402 |
| | UGCUGCAGGGUGUGAGAAACUCCUAUUGCUGGACGAUGUCUCUU | |
| | ACGAGGCAUUAGCACUGAGCCCAUGCAGCUCUCmCsmAsmGsA | |
| sgRNA_370 | mGsmUsmUsCUGUCUUUUGGUCAGGACAACCGUCUAGCUAUAAG | 403 |
| | UGCUGCAGGGUGUGAGAAACUCCUAUUGCUGGACGAUGUCUCUU | |
| | ACGAGGCAUUAGCACCUCCUCAGUUGUGAGCCCmAsmUsmGsC | |
| sgRNA_371 | mGsmUsmUsCUGUCUUUUGGUCAGGACAACCGUCUAGCUAUAAG | 404 |
| | UGCUGCAGGGUGUGAGAAACUCCUAUUGCUGGACGAUGUCUCUU | |
| | ACGAGGCAUUAGCACGUAGAAGGGAUAUACAAAmGsmUsmGsG | |
| sgRNA_372 | mGsmUsmUsCUGUCUUUUGGUCAGGACAACCGUCUAGCUAUAAG | 405 |
| | UGCUGCAGGGUGUGAGAAACUCCUAUUGCUGGACGAUGUCUCUU | |
| | ACGAGGCAUUAGCACCCACUUUGUAUAUCCCUUmCsmUsmAsC | |
| sgRNA_373 | mGsmUsmUsCUGUCUUUUGGUCAGGACAACCGUCUAGCUAUAAG | 406 |
| | UGCUGCAGGGUGUGAGAAACUCCUAUUGCUGGACGAUGUCUCUU | |
| | ACGAGGCAUUAGCACGGUGUCUAUUUCCACUUUmGsmUsmAsU | |
| sgRNA_374 | mGsmUsmUsCUGUCUUUUGGUCAGGACAACCGUCUAGCUAUAAG | 407 |
| | UGCUGCAGGGUGUGAGAAACUCCUAUUGCUGGACGAUGUCUCUU | |
| | ACGAGGCAUUAGCACCAUGAGCAUGCAGAGGUGmAsmGsmUsA | |
| gRNA1594 | mCsmAsmAsCUUACCCAGAGGCAAAUGUUUUAGAGCUAGAAAUA | 597 |
| | GCAAGUUAAAAUAAGGCUAGUCCGUUAUCAACUUGAAAAAGUGG | |
| | CACCGAGUCGGUGCUsmUsmUsmU | |
| gRNA1595 | mAsmAsmUsGGCUCCCAGGUGUCAUCGUUUUAGAGCUAGAAAUA | 598 |
| | GCAAGUUAAAAUAAGGCUAGUCCGUUAUCAACUUGAAAAAGUGG | |
| | CACCGAGUCGGUGCUsmUsmUsmU | |
| gRNA1596 | mGsmGsmCsUCCCAGGUGUCAUCAGCGUUUUAGAGCUAGAAAUA | 599 |
| | GCAAGUUAAAAUAAGGCUAGUCCGUUAUCAACUUGAAAAAGUGG | |
| | CACCGAGUCGGUGCUsmUsmUsmU | |
| gRNA1597 | mCsmUsmCsUCAUAGGUGGUAUUCACGUUUUAGAGCUAGAAAUA | 600 |
| | GCAAGUUAAAAUAAGGCUAGUCCGUUAUCAACUUGAAAAAGUGG | |
| | CACCGAGUCGGUGCUsmUsmUsmU | |
| gRNA1598 | mUsmAsmUsAGGAAAACCAGUGAGUCGUUUUAGAGCUAGAAAUA | 601 |
| | GCAAGUUAAAAUAAGGCUAGUCCGUUAUCAACUUGAAAAAGUGG | |
| | CACCGAGUCGGUGCUsmUsmUsmU | |
| gRNA1599 | mUsmAsmCsUCACCUCUGCAUGCUCAGUUUUAGAGCUAGAAAUA | 602 |
| | GCAAGUUAAAAUAAGGCUAGUCCGUUAUCAACUUGAAAAAGUGG | |
| | CACCGAGUCGGUGCUsmUsmUsmU | |
| gRNA1600 | mGsmCsmAsACUUACCCAGAGGCAAAGUUUUAGAGCUAGAAAUA | 603 |
| | GCAAGUUAAAAUAAGGCUAGUCCGUUAUCAACUUGAAAAAGUGG | |
| | CACCGAGUCGGUGCUsmUsmUsmU | |
| gRNA1601 | mUsmCsmUsGUAUACUCACCUCUGCAGUUUUAGAGCUAGAAAUA | 604 |
| | GCAAGUUAAAAUAAGGCUAGUCCGUUAUCAACUUGAAAAAGUGG | |
| | CACCGAGUCGGUGCUsmUsmUsmU | |
| gRNA1602 | mGsmAsmAsACACUCACCGUAGGGCCGUUUUAGAGCUAGAAAUA | 605 |
| | GCAAGUUAAAAUAAGGCUAGUCCGUUAUCAACUUGAAAAAGUGG | |
| | CACCGAGUCGGUGCUsmUsmUsmU | |
| gRNA1603 | mCsmUsmCsUACACCCAGGGCACCGGGUUUUAGAGCUAGAAAUA | 606 |
| | GCAAGUUAAAAUAAGGCUAGUCCGUUAUCAACUUGAAAAAGUGG | |
| | CACCGAGUCGGUGCUsmUsmUsmU | |
| gRNA1604 | mAsmCsmAsCCUUAUAGGAAAACCAGGUUUUAGAGCUAGAAAUA | 607 |
| | GCAAGUUAAAAUAAGGCUAGUCCGUUAUCAACUUGAAAAAGUGG | |
| | CACCGAGUCGGUGCUsmUsmUsmU | |
| gRNA1605 | mAsmUsmAsGGAAAACCAGUGAGUCUGUUUUAGAGCUAGAAAUA | 608 |
| | GCAAGUUAAAAUAAGGCUAGUCCGUUAUCAACUUGAAAAAGUGG | |
| | CACCGAGUCGGUGCUsmUsmUsmU | |
| gRNA1606 | mAsmCsmUsCACCUCUGCAUGCUCAUGUUUUAGAGCUAGAAAUA | 609 |
| | GCAAGUUAAAAUAAGGCUAGUCCGUUAUCAACUUGAAAAAGUGG | |
| | CACCGAGUCGGUGCUsmUsmUsmU | |
| gRNA1607 | mCsmUsmCsACCGUAGGGCCAGCCUCGUUUUAGAGCUAGAAAUA | 610 |
| | GCAAGUUAAAAUAAGGCUAGUCCGUUAUCAACUUGAAAAAGUGG | |
| | CACCGAGUCGGUGCUsmUsmUsmU | |
| gRNA1746 | mAsmAsmCsCUGCUGAUUCUGAUUAUGUUUUAGAGCUAGAAAUAG | 753 |
| | CAAGUUAAAAUAAGGCUAGUCCGUUAUCAACUUGAAAAAGUGGC | |
| | ACCGAGUCGGUGCUsmUsmUsmU | |
| gRNA1747 | mAsmAsmGsAGAGAAUAAGUAACCCAUGUUUUAGUACUCUGUAAU | 754 |
| | GAAAAUUACAGAAUCUACUAAAACAAGGCAAAAUGCCGUGUUUA | |
| | UCUCGUCAACUUGUUGGCGAGAUsmUsmUsmU | |
| gRNA1748 | mAsmAsmGsCAGCCUAGCUCAGGAGAAGUUUUAGUACUCUGUAAU | 755 |
| | GAAAAUUACAGAAUCUACUAAAACAAGGCAAAAUGCCGUGUUUA | |
| | UCUCGUCAACUUGUUGGCGAGAUsmUsmUsmU | |
| gRNA1749 | mAsmAsmGsUCCACUCAUUCUUGGCAGUUUUAGAGCUAGAAAUAG | 756 |
| | CAAGUUAAAAUAAGGCUAGUCCGUUAUCAACUUGAAAAAGUGGC | |
| | ACCGAGUCGGUGCUsmUsmUsmU | |
| gRNA1750 | mAsmCsmGsAUGAGAAGCCAUCCUGCCGUUUUAGUACUCUGUAAU | 757 |
| | GAAAAUUACAGAAUCUACUAAAACAAGGCAAAAUGCCGUGUUUA | |
| | UCUCGUCAACUUGUUGGCGAGAUsmUsmUsmU | |
| gRNA1751 | mAsmGsmAsCAAGGUUCAUAUUUGUAGUUUUAGAGCUAGAAAUAG | 758 |
| | CAAGUUAAAAUAAGGCUAGUCCGUUAUCAACUUGAAAAAGUGGC | |
| | ACCGAGUCGGUGCUsmUsmUsmU | |
| gRNA1752 | mAsmGsmGsCUGGGAGCAGCCAUCACGUUUUAGAGCUAGAAAUAG | 759 |
| | CAAGUUAAAAUAAGGCUAGUCCGUUAUCAACUUGAAAAAGUGGC | |
| | ACCGAGUCGGUGCUsmUsmUsmU | |
| gRNA1753 | mAsmUsmAsAGUAACCCAUACAAAUAGUUUUAGAGCUAGAAAUAG | 760 |
| | CAAGUUAAAAUAAGGCUAGUCCGUUAUCAACUUGAAAAAGUGGC | |
| | ACCGAGUCGGUGCUsmUsmUsmU | |
| gRNA1754 | mAsmUsmAsCUCACUUCUCCUGAGCUGUUUUAGAGCUAGAAAUAG | 761 |
| | CAAGUUAAAAUAAGGCUAGUCCGUUAUCAACUUGAAAAAGUGGC | |
| | ACCGAGUCGGUGCUsmUsmUsmU | |
| gRNA1755 | mAsmUsmUsAUUGACUUAGUCAACAAGUUUUAGAGCUAGAAAUAG | 762 |
| | CAAGUUAAAAUAAGGCUAGUCCGUUAUCAACUUGAAAAAGUGGC | |
| | ACCGAGUCGGUGCUsmUsmUsmU | |
| gRNA1756 | mCsmAsmAsAUAUGAACCUUGUCUAGGUUUUAGAGCUAGAAAUAG | 763 |
| | CAAGUUAAAAUAAGGCUAGUCCGUUAUCAACUUGAAAAAGUGGC | |
| | ACCGAGUCGGUGCUsmUsmUsmU | |
| gRNA1757 | mCsmAsmGsAAGUCCACUCAUUCUUGGGUUUUAGUACUCUGUAAU | 764 |
| | GAAAAUUACAGAAUCUACUAAAACAAGGCAAAAUGCCGUGUUUA | |
| | UCUCGUCAACUUGUUGGCGAGAUsmUsmUsmU | |
| gRNA1758 | mCsmAsmGsGCUGGGAGCAGCCAUCACGUUUUAGUACUCUGUAAU | 765 |
| | GAAAAUUACAGAAUCUACUAAAACAAGGCAAAAUGCCGUGUUUA | |
| | UCUCGUCAACUUGUUGGCGAGAUsmUsmUsmU | |
| gRNA1759 | mCsmCsmAsUCCUGCCAAGAAUGAGUGUUUUAGAGCUAGAAAUAG | 766 |
| | CAAGUUAAAAUAAGGCUAGUCCGUUAUCAACUUGAAAAAGUGGC | |
| | ACCGAGUCGGUGCUsmUsmUsmU | |
| gRNA1760 | mCsmCsmUsGCUGAUUCUGAUUAUUGAGUUUUAGUACUCUGUAAU | 767 |
| | GAAAAUUACAGAAUCUACUAAAACAAGGCAAAAUGCCGUGUUUA | |
| | UCUCGUCAACUUGUUGGCGAGAUsmUsmUsmU | |
| gRNA1761 | mCsmGsmAsUGCUCUAAUCUCUCUAGAGUUUUAGUACUCUGUAAU | 768 |
| | GAAAAUUACAGAAUCUACUAAAACAAGGCAAAAUGCCGUGUUUA | |
| | UCUCGUCAACUUGUUGGCGAGAUsmUsmUsmU | |
| gRNA1762 | mCsmUsmAsAGUCAAUAAUCAGAAUCAGUUUUAGUACUCUGUAAU | 769 |
| | GAAAAUUACAGAAUCUACUAAAACAAGGCAAAAUGCCGUGUUUA | |
| | UCUCGUCAACUUGUUGGCGAGAUsmUsmUsmU | |
| gRNA1763 | mCsmUsmAsGACAAGGUUCAUAUUUGUGUUUUAGUACUCUGUAAU | 770 |
| | GAAAAUUACAGAAUCUACUAAAACAAGGCAAAAUGCCGUGUUUA | |
| | UCUCGUCAACUUGUUGGCGAGAUsmUsmUsmU | |
| gRNA1764 | mGsmAsmAsCCUUGUCUAGAGAGAUUGUUUUAGAGCUAGAAAUAG | 771 |
| | CAAGUUAAAAUAAGGCUAGUCCGUUAUCAACUUGAAAAAGUGGC | |
| | ACCGAGUCGGUGCUsmUsmUsmU | |
| gRNA1765 | mGsmAsmAsGUCCACUCAUUCUUGGCGUUUUAGAGCUAGAAAUAG | 772 |
| | CAAGUUAAAAUAAGGCUAGUCCGUUAUCAACUUGAAAAAGUGGC | |
| | ACCGAGUCGGUGCUsmUsmUsmU | |
| gRNA1766 | mGsmAsmAsUCAGCAGGUUUGCAGUCGUUUUAGAGCUAGAAAUAG | 773 |
| | CAAGUUAAAAUAAGGCUAGUCCGUUAUCAACUUGAAAAAGUGGC | |
| | ACCGAGUCGGUGCUsmUsmUsmU | |
| gRNA1767 | mGsmAsmAsUGAGUGGACUUCUGUGAGUUUUAGAGCUAGAAAUAG | 774 |
| | CAAGUUAAAAUAAGGCUAGUCCGUUAUCAACUUGAAAAAGUGGC | |
| | ACCGAGUCGGUGCUsmUsmUsmU | |
| gRNA1768 | mGsmAsmCsUGCAAACCUGCUGAUUCGUUUUAGAGCUAGAAAUAG | 775 |
| | CAAGUUAAAAUAAGGCUAGUCCGUUAUCAACUUGAAAAAGUGGC | |
| | ACCGAGUCGGUGCUsmUsmUsmU | |
| gRNA1769 | mGsmAsmCsUUAGUCAACAAAGAGAGAGUUUUAGUACUCUGUAAU | 776 |
| | GAAAAUUACAGAAUCUACUAAAACAAGGCAAAAUGCCGUGUUUA | |
| | UCUCGUCAACUUGUUGGCGAGAUsmUsmUsmU | |
| gRNA1770 | mGsmAsmUsAAGCAGCCUAGCUCAGGGUUUUAGAGCUAGAAAUAG | 777 |
| | CAAGUUAAAAUAAGGCUAGUCCGUUAUCAACUUGAAAAAGUGGC | |
| | ACCGAGUCGGUGCUsmUsmUsmU | |
| gRNA1771 | mGsmAsmUsGAGAAGCCAUCCUGCCAGUUUUAGAGCUAGAAAUAG | 778 |
| | CAAGUUAAAAUAAGGCUAGUCCGUUAUCAACUUGAAAAAGUGGC | |
| | ACCGAGUCGGUGCUsmUsmUsmU | |
| gRNA1772 | mGsmCsmCsAUCCUGCCAAGAAUGAGGUUUUAGAGCUAGAAAUAG | 779 |
| | CAAGUUAAAAUAAGGCUAGUCCGUUAUCAACUUGAAAAAGUGGC | |
| | ACCGAGUCGGUGCUsmUsmUsmU | |
| gRNA1773 | mGsmCsmUsUUUAUACUCACUUCUCCGUUUUAGAGCUAGAAAUAG | 780 |
| | CAAGUUAAAAUAAGGCUAGUCCGUUAUCAACUUGAAAAAGUGGC | |
| | ACCGAGUCGGUGCUsmUsmUsmU | |
| gRNA1774 | mGsmGsmAsUAAGCAGCCUAGCUCAGGGUUUUAGUACUCUGUAAU | 781 |
| | GAAAAUUACAGAAUCUACUAAAACAAGGCAAAAUGCCGUGUUUA | |
| | UCUCGUCAACUUGUUGGCGAGAUsmUsmUsmU | |
| gRNA1775 | mGsmUsmCsUAGAGAGAUUAGAGCAUGUUUUAGAGCUAGAAAUAG | 782 |
| | CAAGUUAAAAUAAGGCUAGUCCGUUAUCAACUUGAAAAAGUGGC | |
| | ACCGAGUCGGUGCUsmUsmUsmU | |
| gRNA1776 | mGsmUsmGsAUGGCUGCUCCCAGCCUGUUUUAGAGCUAGAAAUAG | 783 |
| | CAAGUUAAAAUAAGGCUAGUCCGUUAUCAACUUGAAAAAGUGGC | |
| | ACCGAGUCGGUGCUsmUsmUsmU | |
| gRNA1777 | mUsmAsmCsUUAUUCUCUCUUUGUUGAGUUUUAGUACUCUGUAAU | 784 |
| | GAAAAUUACAGAAUCUACUAAAACAAGGCAAAAUGCCGUGUUUA | |
| | UCUCGUCAACUUGUUGGCGAGAUsmUsmUsmU | |
| gRNA1778 | mUsmAsmUsUCUCUCUUUGUUGACUAAGUUUUAGUACUCUGUAAU | 785 |
| | GAAAAUUACAGAAUCUACUAAAACAAGGCAAAAUGCCGUGUUUA | |
| | UCUCGUCAACUUGUUGGCGAGAUsmUsmUsmU | |
| gRNA1779 | mUsmAsmUsUGACUUAGUCAACAAAGGUUUUAGAGCUAGAAAUAG | 786 |
| | CAAGUUAAAAUAAGGCUAGUCCGUUAUCAACUUGAAAAAGUGGC | |
| | ACCGAGUCGGUGCUsmUsmUsmU | |
| gRNA1780 | mUsmAsmUsUGACUUAGUCAACAAAGAGUUUUAGUACUCUGUAAU | 787 |
| | GAAAAUUACAGAAUCUACUAAAACAAGGCAAAAUGCCGUGUUUA | |
| | UCUCGUCAACUUGUUGGCGAGAUsmUsmUsmU | |
| gRNA1781 | mUsmCsmAsGAAUCAGCAGGUUUGCAGGUUUUAGUACUCUGUAAU | 788 |
| | GAAAAUUACAGAAUCUACUAAAACAAGGCAAAAUGCCGUGUUUA | |
| | UCUCGUCAACUUGUUGGCGAGAUsmUsmUsmU | |
| gRNA1782 | mUsmCsmCsACUCAUUCUUGGCAGGAGUUUUAGAGCUAGAAAUAG | 789 |
| | CAAGUUAAAAUAAGGCUAGUCCGUUAUCAACUUGAAAAAGUGGC | |
| | ACCGAGUCGGUGCUsmUsmUsmU | |
| gRNA1783 | mUsmCsmUsCUCUUUGUUGACUAAGUCGUUUUAGUACUCUGUAAU | 790 |
| | GAAAAUUACAGAAUCUACUAAAACAAGGCAAAAUGCCGUGUUUA | |
| | UCUCGUCAACUUGUUGGCGAGAUsmUsmUsmU | |
| gRNA1784 | mUsmGsmAsGAAGCCAUCCUGCCAAGAGUUUUAGUACUCUGUAAU | 791 |
| | GAAAAUUACAGAAUCUACUAAAACAAGGCAAAAUGCCGUGUUUA | |
| | UCUCGUCAACUUGUUGGCGAGAUsmUsmUsmU | |
| gRNA1785 | mUsmGsmAsGCUAGGCUGCUUAUCCCUGUUUUAGUACUCUGUAAU | 792 |
| | GAAAAUUACAGAAUCUACUAAAACAAGGCAAAAUGCCGUGUUUA | |
| | UCUCGUCAACUUGUUGGCGAGAUsmUsmUsmU | |
| gRNA1786 | mUsmGsmAsGUAUAAAAGCCCCAGGCGUUUUAGAGCUAGAAAUAG | 793 |
| | CAAGUUAAAAUAAGGCUAGUCCGUUAUCAACUUGAAAAAGUGGC | |
| | ACCGAGUCGGUGCUsmUsmUsmU | |
| gRNA1787 | mUsmGsmAsUGGCUGCUCCCAGCCUGGUUUUAGAGCUAGAAAUAG | 794 |
| | CAAGUUAAAAUAAGGCUAGUCCGUUAUCAACUUGAAAAAGUGGC | |
| | ACCGAGUCGGUGCUsmUsmUsmU | |
| gRNA1788 | mUsmGsmCsCAAGAAUGAGUGGACUUCGUUUUAGUACUCUGUAAU | 795 |
| | GAAAAUUACAGAAUCUACUAAAACAAGGCAAAAUGCCGUGUUUA | |
| | UCUCGUCAACUUGUUGGCGAGAUsmUsmUsmU | |
| gRNA1789 | mUsmGsmCsCAAUCUGACUGCAAACCUGUUUUAGUACUCUGUAAU | 796 |
| | GAAAAUUACAGAAUCUACUAAAACAAGGCAAAAUGCCGUGUUUA | |
| | UCUCGUCAACUUGUUGGCGAGAUsmUsmUsmU | |
| gRNA1790 | mUsmGsmUsUGACUAAGUCAAUAAUCGUUUUAGAGCUAGAAAUAG | 797 |
| | CAAGUUAAAAUAAGGCUAGUCCGUUAUCAACUUGAAAAAGUGGC | |
| | ACCGAGUCGGUGCUsmUsmUsmU | |
| gRNA1791 | mUsmUsmGsACUUAGUCAACAAAGAGGUUUUAGAGCUAGAAAUAG | 798 |
| | CAAGUUAAAAUAAGGCUAGUCCGUUAUCAACUUGAAAAAGUGGC | |
| | ACCGAGUCGGUGCUsmUsmUsmU | |
| gRNA1792 | mUsmUsmUsGUUGACUAAGUCAAUAAUGUUUUAGUACUCUGUAAU | 799 |
| | GAAAAUUACAGAAUCUACUAAAACAAGGCAAAAUGCCGUGUUUA | |
| | UCUCGUCAACUUGUUGGCGAGAUsmUsmUsmU | |
| gRNA-#1 | mAsmAsmAsAGCCCCAGGCUGGGAGCGUUUUAGAGCUAGAAAUAG | 800 |
| | CAAGUUAAAAUAAGGCUAGUCCGUUAUCAACUUGAAAAAGUGGC | |
| | ACCGAGUCGGUGCUsmUsmUsmU | |
| gRNA-#2 | mAsmAsmGsUGAGUAUAAAAGCCCCAGUUUUAGAGCUAGAAAUAG | 801 |
| | CAAGUUAAAAUAAGGCUAGUCCGUUAUCAACUUGAAAAAGUGGC | |
| | ACCGAGUCGGUGCUsmUsmUsmU | |
| gRNA-#3 | mAsmAsmUsAAUCAGAAUCAGCAGGUUGUUUUAGUACUCUGUAAU | 802 |
| | GAAAAUUACAGAAUCUACUAAAACAAGGCAAAAUGCCGUGUUUA | |
| | UCUCGUCAACUUGUUGGCGAGAUsmUsmUsmU | |
| gRNA-#4 | mAsmAsmUsAUGAACCUUGUCUAGAGGUUUUAGAGCUAGAAAUAG | 803 |
| | CAAGUUAAAAUAAGGCUAGUCCGUUAUCAACUUGAAAAAGUGGC | |
| | ACCGAGUCGGUGCUsmUsmUsmU | |
| gRNA-#5 | mAsmAsmUsGAGUGGACUUCUGUGAUGUUUUAGAGCUAGAAAUAG | 804 |
| | CAAGUUAAAAUAAGGCUAGUCCGUUAUCAACUUGAAAAAGUGGC | |
| | ACCGAGUCGGUGCUsmUsmUsmU | |
| gRNA-#6 | mAsmCsmAsAAUAUGAACCUUGUCUAGGUUUUAGUACUCUGUAAU | 805 |
| | GAAAAUUACAGAAUCUACUAAAACAAGGCAAAAUGCCGUGUUUA | |
| | UCUCGUCAACUUGUUGGCGAGAUsmUsmUsmU | |
| gRNA-#7 | mAsmCsmAsGAAGUCCACUCAUUCUUGUUUUAGAGCUAGAAAUAG | 806 |
| | CAAGUUAAAAUAAGGCUAGUCCGUUAUCAACUUGAAAAAGUGGC | |
| | ACCGAGUCGGUGCUsmUsmUsmU | |
| gRNA-#8 | mAsmCsmCsUUGUCUAGAGAGAUUAGGUUUUAGAGCUAGAAAUAG | 807 |
| | CAAGUUAAAAUAAGGCUAGUCCGUUAUCAACUUGAAAAAGUGGC | |
| | ACCGAGUCGGUGCUsmUsmUsmU | |
| gRNA-#9 | mAsmGsmAsAGCCAUCCUGCCAAGAAGUUUUAGAGCUAGAAAUAG | 808 |
| | CAAGUUAAAAUAAGGCUAGUCCGUUAUCAACUUGAAAAAGUGGC | |
| | ACCGAGUCGGUGCUsmUsmUsmU | |
| gRNA-#10 | mAsmGsmCsAGGUUUGCAGUCAGAUUGUUUUAGAGCUAGAAAUAG | 809 |
| | CAAGUUAAAAUAAGGCUAGUCCGUUAUCAACUUGAAAAAGUGGC | |
| | ACCGAGUCGGUGCUsmUsmUsmU | |
| gRNA-#11 | mAsmGsmGsGAUAAGCAGCCUAGCUCGUUUUAGAGCUAGAAAUAG | 810 |
| | CAAGUUAAAAUAAGGCUAGUCCGUUAUCAACUUGAAAAAGUGGC | |
| | ACCGAGUCGGUGCUsmUsmUsmU | |
| gRNA-#12 | mAsmGsmGsUUUGCAGUCAGAUUGGCGUUUUAGAGCUAGAAAUAG | 811 |
| | CAAGUUAAAAUAAGGCUAGUCCGUUAUCAACUUGAAAAAGUGGC | |
| | ACCGAGUCGGUGCUsmUsmUsmU | |
| gRNA-#13 | mAsmGsmUsAUAAAAGCCCCAGGCUGGUUUUAGAGCUAGAAAUAG | 812 |
| | CAAGUUAAAAUAAGGCUAGUCCGUUAUCAACUUGAAAAAGUGGC | |
| | ACCGAGUCGGUGCUsmUsmUsmU | |
| gRNA-#14 | mAsmGsmUsCAAUAAUCAGAAUCAGCGUUUUAGAGCUAGAAAUAG | 813 |
| | CAAGUUAAAAUAAGGCUAGUCCGUUAUCAACUUGAAAAAGUGGC | |
| | ACCGAGUCGGUGCUsmUsmUsmU | |
| gRNA-#15 | mAsmUsmAsAUCAGAAUCAGCAGGUUGUUUUAGAGCUAGAAAUAG | 814 |
| | CAAGUUAAAAUAAGGCUAGUCCGUUAUCAACUUGAAAAAGUGGC | |
| | ACCGAGUCGGUGCUsmUsmUsmU | |
| gRNA-#16 | mGsmUsmUsCUGUCUUUUGGUCAGGACAACCGUCUAGCUAUAAGU | 815 |
| | GCUGCAGGGUGUGAGAAACUCCUAUUGCUGGACGAUGUCUCUUA | |
| | CGAGGCAUUAGCACUUGACUUAGUCAACAAAGAsmGsmAsmG | |
| gRNA-#17 | mGsmUsmUsCUGUCUUUUGGUCAGGACAACCGUCUAGCUAUAAGU | 816 |
| | GCUGCAGGGUGUGAGAAACUCCUAUUGCUGGACGAUGUCUCUUA | |
| | CGAGGCAUUAGCACUCUCUUUGUUGACUAAGUCsmAsmAsmU | |
| gRNA-#18 | mGsmUsmUsCUGUCUUUUGGUCAGGACAACCGUCUAGCUAUAAGU | 817 |
| | GCUGCAGGGUGUGAGAAACUCCUAUUGCUGGACGAUGUCUCUUA | |
| | CGAGGCAUUAGCACUGAUUAUUGACUUAGUCAAsmCsmAsmA | |
| gRNA-#19 | mGsmUsmUsCUGUCUUUUGGUCAGGACAACCGUCUAGCUAUAAGU | 818 |
| | GCUGCAGGGUGUGAGAAACUCCUAUUGCUGGACGAUGUCUCUUA | |
| | CGAGGCAUUAGCACUUGGCAGGAUGGCUUCUCAsmUsmCsmG | |
| gRNA-#20 | mGsmUsmUsCUGUCUUUUGGUCAGGACAACCGUCUAGCUAUAAGU | 819 |
| | GCUGCAGGGUGUGAGAAACUCCUAUUGCUGGACGAUGUCUCUUA | |
| | CGAGGCAUUAGCACACUUAGUCAACAAAGAGAGsmAsmAsmU | |
| gRNA-#21 | mGsmUsmUsCUGUCUUUUGGUCAGGACAACCGUCUAGCUAUAAGU | 820 |
| | GCUGCAGGGUGUGAGAAACUCCUAUUGCUGGACGAUGUCUCUUA | |
| | CGAGGCAUUAGCACGCAGGGAUAAGCAGCCUAGsmCsmUsmC | |
| gRNA-#22 | mGsmUsmUsCUGUCUUUUGGUCAGGACAACCGUCUAGCUAUAAGU | 821 |
| | GCUGCAGGGUGUGAGAAACUCCUAUUGCUGGACGAUGUCUCUUA | |
| | CGAGGCAUUAGCACGUAUGGGUUACUUAUUCUCsmUsmCsmU | |
| gRNA-#23 | mCsmAsmAsGAAUGAGUGGACUUCUGGUUUUAGAGCUAGAAAUAG | 822 |
| | CAAGUUAAAAUAAGGCUAGUCCGUUAUCAACUUGAAAAAGUGGC | |
| | ACCGAGUCGGUGCUsmUsmUsmU | |
| gRNA-#24 | mCsmAsmAsUCUGACUGCAAACCUGCGUUUUAGAGCUAGAAAUAG | 823 |
| | CAAGUUAAAAUAAGGCUAGUCCGUUAUCAACUUGAAAAAGUGGC | |
| | ACCGAGUCGGUGCUsmUsmUsmU | |
| gRNA-#25 | mCsmAsmCsAGAAGUCCACUCAUUCUGUUUUAGAGCUAGAAAUAG | 824 |
| | CAAGUUAAAAUAAGGCUAGUCCGUUAUCAACUUGAAAAAGUGGC | |
| | ACCGAGUCGGUGCUsmUsmUsmU | |
| gRNA-#26 | mCsmAsmGsACGAUGAGAAGCCAUCCGUUUUAGAGCUAGAAAUAG | 825 |
| | CAAGUUAAAAUAAGGCUAGUCCGUUAUCAACUUGAAAAAGUGGC | |
| | ACCGAGUCGGUGCUsmUsmUsmU | |
| gRNA-#27 | mCsmAsmGsCAGGUUUGCAGUCAGAUGUUUUAGAGCUAGAAAUAG | 826 |
| | CAAGUUAAAAUAAGGCUAGUCCGUUAUCAACUUGAAAAAGUGGC | |
| | ACCGAGUCGGUGCUsmUsmUsmU | |
| gRNA-#28 | mCsmAsmGsGAUGGCUUCUCAUCGUCGUUUUAGAGCUAGAAAUAG | 827 |
| | CAAGUUAAAAUAAGGCUAGUCCGUUAUCAACUUGAAAAAGUGGC | |
| | ACCGAGUCGGUGCUsmUsmUsmU | |
| gRNA-#29 | mCsmAsmGsGUUUGCAGUCAGAUUGGCGUUUUAGUACUCUGUAAU | 828 |
| | GAAAAUUACAGAAUCUACUAAAACAAGGCAAAAUGCCGUGUUUA | |
| | UCUCGUCAACUUGUUGGCGAGAUsmUsmUsmU | |
| gRNA-#30 | mCsmAsmGsUCAGAUUGGCAGGGAUAGUUUUAGAGCUAGAAAUAG | 829 |
| | CAAGUUAAAAUAAGGCUAGUCCGUUAUCAACUUGAAAAAGUGGC | |
| | ACCGAGUCGGUGCUsmUsmUsmU | |
| gRNA-#31 | mCsmCsmAsCUCAUUCUUGGCAGGAUGUUUUAGAGCUAGAAAUAG | 830 |
| | CAAGUUAAAAUAAGGCUAGUCCGUUAUCAACUUGAAAAAGUGGC | |
| | ACCGAGUCGGUGCUsmUsmUsmU | |
| gRNA-#32 | mCsmUsmAsAGUCAAUAAUCAGAAUCGUUUUAGAGCUAGAAAUAG | 831 |
| | CAAGUUAAAAUAAGGCUAGUCCGUUAUCAACUUGAAAAAGUGGC | |
| | ACCGAGUCGGUGCUsmUsmUsmU | |
| gRNA-#33 | mGsmUsmUsCUGUCUUUUGGUCAGGACAACCGUCUAGCUAUAAGU | 832 |
| | GCUGCAGGGUGUGAGAAACUCCUAUUGCUGGACGAUGUCUCUUA | |
| | CGAGGCAUUAGCACGUCAACAAAGAGAGAAUAAsmGsmUsmA | |
| gRNA-#34 | mCsmUsmUsAUCCCUGCCAAUCUGACGUUUUAGAGCUAGAAAUAG | 833 |
| | CAAGUUAAAAUAAGGCUAGUCCGUUAUCAACUUGAAAAAGUGGC | |
| | ACCGAGUCGGUGCUsmUsmUsmU | |
| gRNA-#35 | mGsmUsmUsCUGUCUUUUGGUCAGGACAACCGUCUAGCUAUAAGU | 834 |
| | GCUGCAGGGUGUGAGAAACUCCUAUUGCUGGACGAUGUCUCUUA | |
| | CGAGGCAUUAGCACUCCCUGCCAAUCUGACUGCsmAsmAsmA | |
| gRNA-#36 | mGsmUsmUsCUGUCUUUUGGUCAGGACAACCGUCUAGCUAUAAGU | 835 |
| | GCUGCAGGGUGUGAGAAACUCCUAUUGCUGGACGAUGUCUCUUA | |
| | CGAGGCAUUAGCACUUCUCUCUUUGUUGACUAAsmGsmUsmC | |
| gRNA-#37 | mGsmUsmUsCUGUCUUUUGGUCAGGACAACCGUCUAGCUAUAAGU | 836 |
| | GCUGCAGGGUGUGAGAAACUCCUAUUGCUGGACGAUGUCUCUUA | |
| | CGAGGCAUUAGCACUCCUGAGCUAGGCUGCUUAsmUsmCsmC | |
| gRNA-#38 | mCsmUsmUsCUGUGAUGGCUGCUCCCGUUUUAGAGCUAGAAAUAG | 837 |
| | CAAGUUAAAAUAAGGCUAGUCCGUUAUCAACUUGAAAAAGUGGC | |
| | ACCGAGUCGGUGCUsmUsmUsmU | |
| gRNA-#39 | mGsmUsmUsCUGUCUUUUGGUCAGGACAACCGUCUAGCUAUAAGU | 838 |
| | GCUGCAGGGUGUGAGAAACUCCUAUUGCUGGACGAUGUCUCUUA | |
| | CGAGGCAUUAGCACUGUGAUGGCUGCUCCCAGCsmCsmUsmG | |
| gRNA-#40 | mGsmUsmUsCUGUCUUUUGGUCAGGACAACCGUCUAGCUAUAAGU | 839 |
| | GCUGCAGGGUGUGAGAAACUCCUAUUGCUGGACGAUGUCUCUUA | |
| | CGAGGCAUUAGCACGCAGGAUGGCUUCUCAUCGsmUsmCsmU | |
| gRNA-#41 | mGsmUsmUsCUGUCUUUUGGUCAGGACAACCGUCUAGCUAUAAGU | 840 |
| | GCUGCAGGGUGUGAGAAACUCCUAUUGCUGGACGAUGUCUCUUA | |
| | CGAGGCAUUAGCACUCUAGAGAGAUUAGAGCAUsmCsmGsmG | |
| gRNA-#42 | mGsmUsmUsCUGUCUUUUGGUCAGGACAACCGUCUAGCUAUAAGU | 841 |
| | GCUGCAGGGUGUGAGAAACUCCUAUUGCUGGACGAUGUCUCUUA | |
| | CGAGGCAUUAGCACGUUGACUAAGUCAAUAAUCsmAsmGsmA | |
| gRNA-#43 | mGsmUsmUsCUGUCUUUUGGUCAGGACAACCGUCUAGCUAUAAGU | 842 |
| | GCUGCAGGGUGUGAGAAACUCCUAUUGCUGGACGAUGUCUCUUA | |
| | CGAGGCAUUAGCACUAUACUCACUUCUCCUGAGsmCsmUsmA | |
| gRNA-#44 | mGsmAsmAsGUGAGUAUAAAAGCCCCGUUUUAGAGCUAGAAAUAG | 843 |
| | CAAGUUAAAAUAAGGCUAGUCCGUUAUCAACUUGAAAAAGUGGC | |
| | ACCGAGUCGGUGCUsmUsmUsmU | |
| gRNA-#45 | mGsmAsmCsAAGGUUCAUAUUUGUAUGUUUUAGAGCUAGAAAUAG | 844 |
| | CAAGUUAAAAUAAGGCUAGUCCGUUAUCAACUUGAAAAAGUGGC | |
| | ACCGAGUCGGUGCUsmUsmUsmU | |
| gRNA-#46 | mGsmAsmGsUAUAAAAGCCCCAGGCUGUUUUAGAGCUAGAAAUAG | 845 |
| | CAAGUUAAAAUAAGGCUAGUCCGUUAUCAACUUGAAAAAGUGGC | |
| | ACCGAGUCGGUGCUsmUsmUsmU | |
| gRNA-#47 | mGsmAsmGsUGGACUUCUGUGAUGGCGUUUUAGAGCUAGAAAUAG | 846 |
| | CAAGUUAAAAUAAGGCUAGUCCGUUAUCAACUUGAAAAAGUGGC | |
| | ACCGAGUCGGUGCUsmUsmUsmU | |
| gRNA-#48 | mGsmAsmUsGGCUGCUCCCAGCCUGGGUUUUAGAGCUAGAAAUAG | 847 |
| | CAAGUUAAAAUAAGGCUAGUCCGUUAUCAACUUGAAAAAGUGGC | |
| | ACCGAGUCGGUGCUsmUsmUsmU | |
| gRNA-#49 | mGsmCsmAsGCCUAGCUCAGGAGAAGGUUUUAGAGCUAGAAAUAG | 848 |
| | CAAGUUAAAAUAAGGCUAGUCCGUUAUCAACUUGAAAAAGUGGC | |
| | ACCGAGUCGGUGCUsmUsmUsmU | |
| gRNA-#50 | mGsmCsmUsGCUUAUCCCUGCCAAUCGUUUUAGAGCUAGAAAUAG | 849 |
| | CAAGUUAAAAUAAGGCUAGUCCGUUAUCAACUUGAAAAAGUGGC | |
| | ACCGAGUCGGUGCUsmUsmUsmU | |
| gRNA-#51 | mGsmGsmGsAUAAGCAGCCUAGCUCAGUUUUAGAGCUAGAAAUAG | 850 |
| | CAAGUUAAAAUAAGGCUAGUCCGUUAUCAACUUGAAAAAGUGGC | |
| | ACCGAGUCGGUGCUsmUsmUsmU | |
| gRNA-#52 | mGsmGsmUsUUGCAGUCAGAUUGGCAGUUUUAGAGCUAGAAAUAG | 851 |
| | CAAGUUAAAAUAAGGCUAGUCCGUUAUCAACUUGAAAAAGUGGC | |
| | ACCGAGUCGGUGCUsmUsmUsmU | |
| gRNA-#53 | mGsmUsmUsACUUAUUCUCUCUUUGUGUUUUAGAGCUAGAAAUAG | 852 |
| | CAAGUUAAAAUAAGGCUAGUCCGUUAUCAACUUGAAAAAGUGGC | |
| | ACCGAGUCGGUGCUsmUsmUsmU | |
| gRNA-#54 | mGsmUsmUsCUGUCUUUUGGUCAGGACAACCGUCUAGCUAUAAGU | 853 |
| | GCUGCAGGGUGUGAGAAACUCCUAUUGCUGGACGAUGUCUCUUA | |
| | CGAGGCAUUAGCACCUUAUUCUCUCUUUGUUGAsmCsmUsmA | |
| gRNA-#55 | mGsmUsmUsCUGUCUUUUGGUCAGGACAACCGUCUAGCUAUAAGU | 854 |
| | GCUGCAGGGUGUGAGAAACUCCUAUUGCUGGACGAUGUCUCUUA | |
| | CGAGGCAUUAGCACAUAUUUGUAUGGGUUACUUsmAsmUsmU | |
| gRNA-#56 | mGsmUsmUsCUGUCUUUUGGUCAGGACAACCGUCUAGCUAUAAGU | 855 |
| | GCUGCAGGGUGUGAGAAACUCCUAUUGCUGGACGAUGUCUCUUA | |
| | CGAGGCAUUAGCACACUAAGUCAAUAAUCAGAAsmUsmCsmA | |
| gRNA-#57 | mGsmUsmUsUGCAGUCAGAUUGGCAGGUUUUAGAGCUAGAAAUAG | 856 |
| | CAAGUUAAAAUAAGGCUAGUCCGUUAUCAACUUGAAAAAGUGGC | |
| | ACCGAGUCGGUGCUsmUsmUsmU | |
| gRNA-#58 | mGsmUsmUsCUGUCUUUUGGUCAGGACAACCGUCUAGCUAUAAGU | 857 |
| | GCUGCAGGGUGUGAGAAACUCCUAUUGCUGGACGAUGUCUCUUA | |
| | CGAGGCAUUAGCACGCAGUCAGAUUGGCAGGGAsmUsmAsmA | |
| gRNA-#59 | mUsmAsmCsAAAUAUGAACCUUGUCUGUUUUAGAGCUAGAAAUAG | 858 |
| | CAAGUUAAAAUAAGGCUAGUCCGUUAUCAACUUGAAAAAGUGGC | |
| | ACCGAGUCGGUGCUsmUsmUsmU | |
| gRNA-#60 | mUsmAsmCsUCACUUCUCCUGAGCUAGUUUUAGAGCUAGAAAUAG | 859 |
| | CAAGUUAAAAUAAGGCUAGUCCGUUAUCAACUUGAAAAAGUGGC | |
| | ACCGAGUCGGUGCUsmUsmUsmU | |
| gRNA-#61 | mUsmAsmUsAAAAGCCCCAGGCUGGGGUUUUAGAGCUAGAAAUAG | 860 |
| | CAAGUUAAAAUAAGGCUAGUCCGUUAUCAACUUGAAAAAGUGGC | |
| | ACCGAGUCGGUGCUsmUsmUsmU | |
| gRNA-#62 | mUsmCsmAsCUUCUCCUGAGCUAGGCGUUUUAGAGCUAGAAAUAG | 861 |
| | CAAGUUAAAAUAAGGCUAGUCCGUUAUCAACUUGAAAAAGUGGC | |
| | ACCGAGUCGGUGCUsmUsmUsmU | |
| gRNA-#63 | mUsmCsmAsGAUUGGCAGGGAUAAGCGUUUUAGAGCUAGAAAUAG | 862 |
| | CAAGUUAAAAUAAGGCUAGUCCGUUAUCAACUUGAAAAAGUGGC | |
| | ACCGAGUCGGUGCUsmUsmUsmU | |
| gRNA-#64 | mUsmCsmAsGGAGAAGUGAGUAUAAAGUUUUAGAGCUAGAAAUAG | 863 |
| | CAAGUUAAAAUAAGGCUAGUCCGUUAUCAACUUGAAAAAGUGGC | |
| | ACCGAGUCGGUGCUsmUsmUsmU | |
| gRNA-#65 | mUsmCsmUsGACUGCAAACCUGCUGAUGUUUUAGUACUCUGUAAU | 864 |
| | GAAAAUUACAGAAUCUACUAAAACAAGGCAAAAUGCCGUGUUUA | |
| | UCUCGUCAACUUGUUGGCGAGAUsmUsmUsmU | |
| gRNA-#66 | mUsmGsmAsGCUAGGCUGCUUAUCCCGUUUUAGAGCUAGAAAUAG | 865 |
| | CAAGUUAAAAUAAGGCUAGUCCGUUAUCAACUUGAAAAAGUGGC | |
| | ACCGAGUCGGUGCUsmUsmUsmU | |
| gRNA-#67 | mUsmGsmCsCAAUCUGACUGCAAACCGUUUUAGAGCUAGAAAUAG | 866 |
| | CAAGUUAAAAUAAGGCUAGUCCGUUAUCAACUUGAAAAAGUGGC | |
| | ACCGAGUCGGUGCUsmUsmUsmU | |
| gRNA-#68 | mUsmGsmCsUCUAAUCUCUCUAGACAGUUUUAGAGCUAGAAAUAG | 867 |
| | CAAGUUAAAAUAAGGCUAGUCCGUUAUCAACUUGAAAAAGUGGC | |
| | ACCGAGUCGGUGCUsmUsmUsmU | |
| gRNA-#69 | mUsmGsmUsGAUGGCUGCUCCCAGCCGUUUUAGAGCUAGAAAUAG | 868 |
| | CAAGUUAAAAUAAGGCUAGUCCGUUAUCAACUUGAAAAAGUGGC | |
| | ACCGAGUCGGUGCUsmUsmUsmU | |
| gRNA-#70 | mUsmUsmGsGCAGGGAUAAGCAGCCUGUUUUAGAGCUAGAAAUAG | 869 |
| | CAAGUUAAAAUAAGGCUAGUCCGUUAUCAACUUGAAAAAGUGGC | |
| | ACCGAGUCGGUGCUsmUsmUsmU | |
| gRNA-#71 | mUsmUsmUsUAUACUCACUUCUCCUGGUUUUAGAGCUAGAAAUAG | 870 |
| | CAAGUUAAAAUAAGGCUAGUCCGUUAUCAACUUGAAAAAGUGGC | |
| | ACCGAGUCGGUGCUsmUsmUsmU | |

Lowercase m indicates 2′-O-methylated nucleobases (e.g., mA, mC, mG, mU), and “s” indicates phosphorothioates.

TABLE 2A
Exemplary Spacer and Target Site Sequences. One of skill in the art will understand that some of the
target site sequences correspond to a reverse-complement to the above-provided transthyretin
polynucleotide sequence; i.e., the target sequences may correspond to either strand of a dsDNA
molecule encoding a transthyretin polynucleotide. Further, it is to be understood that a C base can
be targeted by a cytidine deaminase and that an A base can be targeted by an adenine deaminase.

| | | SEQ | Target | Target site sequence (target bases | SEQ | |
|---|---|---|---|---|---|---|
| | | ID | site | for base editing are in bold and | ID | Target |
| sgRNA | Spacer sequence | NO | ID | underlined) | NO | Base(s) |
| sgRNA_361 | UAUAGGAAAACCAGUGAGUC | 408 | TSBTx2602 | TATAGGAAAACCAGTGAGTC | 425 | 4A |
| sgRNA_362 | UACUCACCUCUGCAUGCUCA | 409 | TSBTx2603 | TACTCACCTCTGCATGCTCA | 426 | 6A, 7C |
| sgRNA_363 | ACUCACCUCUGCAUGCUCAU | 410 | TSBTx2604 | ACTCACCTCTGCATGCTCAT | 427 | 5A, 6C |
| sgRNA_364 | UACCACCUAUGAGAGAAGAC | 411 | TSBTx2605 | TACCACCTATGAGAGAAGAC | 428 | 7C |
| sgRNA_365 | AUACUCACCUCUGCAUGCUCA | 412 | TSBTx2606 | ATACTCACCTCTGCATGCTCA | 429 | 7A, 8C |
| sgRNA_366 | ACUGGUUUUCCUAUAAGGUGU | 413 | TSBTx2607 | ACTGGTTTTCCTATAAGGTGT | 430 | 11C |
| sgRNA_367 | UUGGCAGGAUGGCUUCUCAUCG | 414 | TSBTx2608 | TTGGCAGGATGGCTTCTCATCG | 431 | 6A, 9A |
| sgRNA_368 | UCCUAUAAGGUGUGAAAGUCUG | 415 | TSBTx2609 | GTTTTCCTATAAGGTGTGAAAGTCTG | 432 | |
| sgRNA_369 | UGAGCCCAUGCAGCUCUCCAGA | 416 | TSBTx2610 | GTTGTGAGCCCATGCAGCTCTCCAGA | 433 | |
| sgRNA_370 | CUCCUCAGUUGUGAGCCCAUGC | 417 | TSBTx2611 | ATTCCTCCTCAGTTGTGAGCCCATGC | 434 | |
| sgRNA_371 | GUAGAAGGGAUAUACAAAGUGG | 418 | TSBTx2612 | ATTTGTAGAAGGGATATACAAAGTGG | 435 | |
| sgRNA_372 | CCACUUUGUAUAUCCCUUCUAC | 419 | TSBTx2613 | ATTTCCACTTTGTATATCCCTTCTAC | 436 | |
| sgRNA_373 | GGUGUCUAUUUCCACUUUGUAU | 420 | TSBTx2614 | ATTTGGTGTCTATTTCCACTTTGTAT | 437 | |
| sgRNA_374 | CAUGAGCAUGCAGAGGUGAGUA | 421 | TSBTx2615 | ATTCCATGAGCATGCAGAGGTGAGTA | 438 | |
| sgRNA_375 | GGCUAUCGUCACCAAUCCCA | 422 | | GGCTATCGTCACCAATCCCA | 439 | 5A |
| sgRNA_376 | GCUAUCGUCACCAAUCCCAA | 423 | | GCTATCGTCACCAATCCCAA | 440 | 4A |
| sgRNA_377 | GGCUAUCGUCACCAAUCCCA | 424 | | GGCTATCGTCACCAATCCCA | 441 | 5A |

TABLE 2B
Exemplary Spacer and Target Site Sequences.

| | | SEQ ID | | SEQ ID |
|---|---|---|---|---|
| gRNA_Name | Spacer Sequence | NO: | Target Site Sequence | NO: |
| gRNA1747 | AAGAGAGAAUAAGUAACCCAU | 453 | AAGAGAGAATAAGTAACCCAT | 500 |
| gRNA1748 | AAGCAGCCUAGCUCAGGAGAA | 454 | AAGCAGCCTAGCTCAGGAGAA | 501 |
| gRNA1749 | AAGUCCACUCAUUCUUGGCA | 455 | AAGTCCACTCATTCTTGGCA | 502 |
| gRNA1750 | ACGAUGAGAAGCCAUCCUGCC | 456 | ACGATGAGAAGCCATCCTGCC | 503 |
| gRNA1751 | AGACAAGGUUCAUAUUUGUA | 457 | AGACAAGGTTCATATTTGTA | 504 |
| gRNA1752 | AGGCUGGGAGCAGCCAUCAC | 458 | AGGCTGGGAGCAGCCATCAC | 505 |
| gRNA1753 | AUAAGUAACCCAUACAAAUA | 459 | ATAAGTAACCCATACAAATA | 506 |
| gRNA1754 | AUACUCACUUCUCCUGAGCU | 460 | ATACTCACTTCTCCTGAGCT | 507 |
| gRNA1755 | AUUAUUGACUUAGUCAACAA | 461 | ATTATTGACTTAGTCAACAA | 508 |
| gRNA1756 | CAAAUAUGAACCUUGUCUAG | 462 | CAAATATGAACCTTGTCTAG | 509 |
| gRNA1757 | CAGAAGUCCACUCAUUCUUGG | 463 | CAGAAGTCCACTCATTCTTGG | 510 |
| gRNA1758 | CAGGCUGGGAGCAGCCAUCAC | 464 | CAGGCTGGGAGCAGCCATCAC | 511 |
| gRNA1759 | CCAUCCUGCCAAGAAUGAGU | 465 | CCATCCTGCCAAGAATGAGT | 512 |
| gRNA1760 | CCUGCUGAUUCUGAUUAUUGA | 466 | CCTGCTGATTCTGATTATTGA | 513 |
| gRNA1761 | CGAUGCUCUAAUCUCUCUAGA | 467 | CGATGCTCTAATCTCTCTAGA | 514 |
| gRNA1762 | CUAAGUCAAUAAUCAGAAUCA | 468 | CTAAGTCAATAATCAGAATCA | 515 |
| gRNA1763 | CUAGACAAGGUUCAUAUUUGU | 469 | CTAGACAAGGTTCATATTTGT | 516 |
| gRNA1764 | GAACCUUGUCUAGAGAGAUU | 470 | GAACCTTGTCTAGAGAGATT | 517 |
| gRNA1765 | GAAGUCCACUCAUUCUUGGC | 471 | GAAGTCCACTCATTCTTGGC | 518 |
| gRNA1766 | GAAUCAGCAGGUUUGCAGUC | 472 | GAATCAGCAGGTTTGCAGTC | 519 |
| gRNA1767 | GAAUGAGUGGACUUCUGUGA | 473 | GAATGAGTGGACTTCTGTGA | 520 |
| gRNA1768 | GACUGCAAACCUGCUGAUUC | 474 | GACTGCAAACCTGCTGATTC | 521 |
| gRNA1769 | GACUUAGUCAACAAAGAGAGA | 475 | GACTTAGTCAACAAAGAGAGA | 522 |
| gRNA1770 | GAUAAGCAGCCUAGCUCAGG | 476 | GATAAGCAGCCTAGCTCAGG | 523 |
| gRNA1771 | GAUGAGAAGCCAUCCUGCCA | 477 | GATGAGAAGCCATCCTGCCA | 524 |
| gRNA1772 | GCCAUCCUGCCAAGAAUGAG | 478 | GCCATCCTGCCAAGAATGAG | 525 |
| gRNA1773 | GCUUUUAUACUCACUUCUCC | 479 | GCTTTTATACTCACTTCTCC | 526 |
| gRNA1774 | GGAUAAGCAGCCUAGCUCAGG | 480 | GGATAAGCAGCCTAGCTCAGG | 527 |
| gRNA1775 | GUCUAGAGAGAUUAGAGCAU | 481 | GTCTAGAGAGATTAGAGCAT | 528 |
| gRNA1776 | GUGAUGGCUGCUCCCAGCCU | 482 | GTGATGGCTGCTCCCAGCCT | 529 |
| gRNA1777 | UACUUAUUCUCUCUUUGUUGA | 483 | TACTTATTCTCTCTTTGTTGA | 530 |
| gRNA1778 | UAUUCUCUCUUUGUUGACUAA | 484 | TATTCTCTCTTTGTTGACTAA | 531 |
| gRNA1779 | UAUUGACUUAGUCAACAAAG | 485 | TATTGACTTAGTCAACAAAG | 532 |
| gRNA1780 | UAUUGACUUAGUCAACAAAGA | 486 | TATTGACTTAGTCAACAAAGA | 533 |
| gRNA1781 | UCAGAAUCAGCAGGUUUGCAG | 487 | TCAGAATCAGCAGGTTTGCAG | 534 |
| gRNA1782 | UCCACUCAUUCUUGGCAGGA | 488 | TCCACTCATTCTTGGCAGGA | 535 |
| gRNA1783 | UCUCUCUUUGUUGACUAAGUC | 489 | TCTCTCTTTGTTGACTAAGTC | 536 |
| gRNA1784 | UGAGAAGCCAUCCUGCCAAGA | 490 | TGAGAAGCCATCCTGCCAAGA | 537 |
| gRNA1785 | UGAGCUAGGCUGCUUAUCCCU | 491 | TGAGCTAGGCTGCTTATCCCT | 538 |
| gRNA1786 | UGAGUAUAAAAGCCCCAGGC | 492 | TGAGTATAAAAGCCCCAGGC | 539 |
| gRNA1787 | UGAUGGCUGCUCCCAGCCUG | 493 | TGATGGCTGCTCCCAGCCTG | 540 |
| gRNA1788 | UGCCAAGAAUGAGUGGACUUC | 494 | TGCCAAGAATGAGTGGACTTC | 541 |
| gRNA1789 | UGCCAAUCUGACUGCAAACCU | 495 | TGCCAATCTGACTGCAAACCT | 542 |
| gRNA1790 | UGUUGACUAAGUCAAUAAUC | 496 | TGTTGACTAAGTCAATAATC | 543 |
| gRNA1791 | UUGACUUAGUCAACAAAGAG | 497 | TTGACTTAGTCAACAAAGAG | 544 |
| gRNA1792 | UUUGUUGACUAAGUCAAUAAU | 498 | TTTGTTGACTAAGTCAATAAT | 545 |
| gRNA1746 | AACCUGCUGAUUCUGAUUAU | 499 | AACCTGCTGATTCTGATTAT | 546 |
| gRNA1594 | CAACUUACCCAGAGGCAAAU | 551 | CAACTTACCCAGAGGCAAAT | 566 |
| gRNA1595 | AAUGGCUCCCAGGUGUCAUC | 552 | AATGGCTCCCAGGTGTCATC | 567 |
| gRNA1596 | GGCUCCCAGGUGUCAUCAGC | 553 | GGCTCCCAGGTGTCATCAGC | 568 |
| gRNA1597 | CUCUCAUAGGUGGUAUUCAC | 554 | CTCTCATAGGTGGTATTCAC | 569 |
| gRNA1598 | UAUAGGAAAACCAGUGAGUC | 555 | TATAGGAAAACCAGTGAGTC | 570 |
| gRNA1599 | UACUCACCUCUGCAUGCUCA | 556 | TACTCACCTCTGCATGCTCA | 571 |
| gRNA1600 | GCAACUUACCCAGAGGCAAA | 557 | GCAACTTACCCAGAGGCAAA | 572 |
| gRNA1601 | UCUGUAUACUCACCUCUGCA | 558 | TCTGTATACTCACCTCTGCA | 573 |
| gRNA1602 | GAAACACUCACCGUAGGGCC | 559 | GAAACACTCACCGTAGGGCC | 574 |
| gRNA1603 | CUCUACACCCAGGGCACCGG | 560 | CTCTACACCCAGGGCACCGG | 575 |
| gRNA1604 | ACACCUUAUAGGAAAACCAG | 561 | ACACCTTATAGGAAAACCAG | 576 |
| gRNA1605 | AUAGGAAAACCAGUGAGUCU | 562 | ATAGGAAAACCAGTGAGTCT | 577 |
| gRNA1606 | ACUCACCUCUGCAUGCUCAU | 563 | ACTCACCTCTGCATGCTCAT | 578 |
| gRNA1607 | CUCACCGUAGGGCCAGCCUC | 564 | CTCACCGTAGGGCCAGCCTC | 579 |
| gRNA-#1 | AAAAGCCCCAGGCUGGGAGC | 611 | AAAAGCCCCAGGCTGGGAGC | 682 |
| gRNA-#2 | AAGUGAGUAUAAAAGCCCCA | 612 | AAGTGAGTATAAAAGCCCCA | 683 |
| gRNA-#3 | AAUAAUCAGAAUCAGCAGGUU | 613 | AATAATCAGAATCAGCAGGTT | 684 |
| gRNA-#4 | AAUAUGAACCUUGUCUAGAG | 614 | AATATGAACCTTGTCTAGAG | 685 |
| gRNA-#5 | AAUGAGUGGACUUCUGUGAU | 615 | AATGAGTGGACTTCTGTGAT | 686 |
| gRNA-#6 | ACAAAUAUGAACCUUGUCUAG | 616 | ACAAATATGAACCTTGTCTAG | 687 |
| gRNA-#7 | ACAGAAGUCCACUCAUUCUU | 617 | ACAGAAGTCCACTCATTCTT | 688 |
| gRNA-#8 | ACCUUGUCUAGAGAGAUUAG | 618 | ACCTTGTCTAGAGAGATTAG | 689 |
| gRNA-#9 | AGAAGCCAUCCUGCCAAGAA | 619 | AGAAGCCATCCTGCCAAGAA | 690 |
| gRNA-#10 | AGCAGGUUUGCAGUCAGAUU | 620 | AGCAGGTTTGCAGTCAGATT | 691 |
| gRNA-#11 | AGGGAUAAGCAGCCUAGCUC | 621 | AGGGATAAGCAGCCTAGCTC | 692 |
| gRNA-#12 | AGGUUUGCAGUCAGAUUGGC | 622 | AGGTTTGCAGTCAGATTGGC | 693 |
| gRNA-#13 | AGUAUAAAAGCCCCAGGCUG | 623 | AGTATAAAAGCCCCAGGCTG | 694 |
| gRNA-#14 | AGUCAAUAAUCAGAAUCAGC | 624 | AGTCAATAATCAGAATCAGC | 695 |
| gRNA-#15 | AUAAUCAGAAUCAGCAGGUU | 625 | ATAATCAGAATCAGCAGGTT | 696 |
| gRNA-#16 | UUGACUUAGUCAACAAAGAGAG | 626 | TTGACTTAGTCAACAAAGAGAG | 697 |
| gRNA-#17 | UCUCUUUGUUGACUAAGUCAAU | 627 | TCTCTTTGTTGACTAAGTCAAT | 698 |
| gRNA-#18 | UGAUUAUUGACUUAGUCAACAA | 628 | TGATTATTGACTTAGTCAACAA | 699 |
| gRNA-#19 | UUGGCAGGAUGGCUUCUCAUCG | 629 | TTGGCAGGATGGCTTCTCATCG | 700 |
| (sgRNA_367) | | | | |
| gRNA-#20 | ACUUAGUCAACAAAGAGAGAAU | 630 | ACTTAGTCAACAAAGAGAGAAT | 701 |
| gRNA-#21 | GCAGGGAUAAGCAGCCUAGCUC | 631 | GCAGGGATAAGCAGCCTAGCTC | 702 |
| gRNA-#22 | GUAUGGGUUACUUAUUCUCUCU | 632 | GTATGGGTTACTTATTCTCTCT | 703 |
| gRNA-#23 | CAAGAAUGAGUGGACUUCUG | 633 | CAAGAATGAGTGGACTTCTG | 704 |
| gRNA-#24 | CAAUCUGACUGCAAACCUGC | 634 | CAATCTGACTGCAAACCTGC | 705 |
| gRNA-#25 | CACAGAAGUCCACUCAUUCU | 635 | CACAGAAGTCCACTCATTCT | 706 |
| gRNA-#26 | CAGACGAUGAGAAGCCAUCC | 636 | CAGACGATGAGAAGCCATCC | 707 |
| gRNA-#27 | CAGCAGGUUUGCAGUCAGAU | 637 | CAGCAGGTTTGCAGTCAGAT | 708 |
| gRNA-#28 | CAGGAUGGCUUCUCAUCGUC | 638 | CAGGATGGCTTCTCATCGTC | 709 |
| gRNA-#29 | CAGGUUUGCAGUCAGAUUGGC | 639 | CAGGTTTGCAGTCAGATTGGC | 710 |
| gRNA-#30 | CAGUCAGAUUGGCAGGGAUA | 640 | CAGTCAGATTGGCAGGGATA | 711 |
| gRNA-#31 | CCACUCAUUCUUGGCAGGAU | 641 | CCACTCATTCTTGGCAGGAT | 712 |
| gRNA-#32 | CUAAGUCAAUAAUCAGAAUC | 642 | CTAAGTCAATAATCAGAATC | 713 |
| gRNA-#33 | GUCAACAAAGAGAGAAUAAGUA | 643 | GTCAACAAAGAGAGAATAAGTA | 714 |
| gRNA-#34 | CUUAUCCCUGCCAAUCUGAC | 644 | CTTATCCCTGCCAATCTGAC | 715 |
| gRNA-#35 | UCCCUGCCAAUCUGACUGCAAA | 645 | TCCCTGCCAATCTGACTGCAAA | 716 |
| gRNA-#36 | UUCUCUCUUUGUUGACUAAGUC | 646 | TTCTCTCTTTGTTGACTAAGTC | 717 |
| gRNA-#37 | UCCUGAGCUAGGCUGCUUAUCC | 647 | TCCTGAGCTAGGCTGCTTATCC | 718 |
| gRNA-#38 | CUUCUGUGAUGGCUGCUCCC | 648 | CTTCTGTGATGGCTGCTCCC | 719 |
| gRNA-#39 | UGUGAUGGCUGCUCCCAGCCUG | 649 | TGTGATGGCTGCTCCCAGCCTG | 720 |
| gRNA-#40 | GCAGGAUGGCUUCUCAUCGUCU | 650 | GCAGGATGGCTTCTCATCGTCT | 721 |
| gRNA-#41 | UCUAGAGAGAUUAGAGCAUCGG | 651 | TCTAGAGAGATTAGAGCATCGG | 722 |
| gRNA-#42 | GUUGACUAAGUCAAUAAUCAGA | 652 | GTTGACTAAGTCAATAATCAGA | 723 |
| gRNA-#43 | UAUACUCACUUCUCCUGAGCUA | 653 | TATACTCACTTCTCCTGAGCTA | 724 |
| gRNA-#44 | GAAGUGAGUAUAAAAGCCCC | 654 | GAAGTGAGTATAAAAGCCCC | 725 |
| gRNA-#45 | GACAAGGUUCAUAUUUGUAU | 655 | GACAAGGTTCATATTTGTAT | 726 |
| gRNA-#46 | GAGUAUAAAAGCCCCAGGCU | 656 | GAGTATAAAAGCCCCAGGCT | 727 |
| gRNA-#47 | GAGUGGACUUCUGUGAUGGC | 657 | GAGTGGACTTCTGTGATGGC | 728 |
| gRNA-#48 | GAUGGCUGCUCCCAGCCUGG | 658 | GATGGCTGCTCCCAGCCTGG | 729 |
| gRNA-#49 | GCAGCCUAGCUCAGGAGAAG | 659 | GCAGCCTAGCTCAGGAGAAG | 730 |
| gRNA-#50 | GCUGCUUAUCCCUGCCAAUC | 660 | GCTGCTTATCCCTGCCAATC | 731 |
| gRNA-#51 | GGGAUAAGCAGCCUAGCUCA | 661 | GGGATAAGCAGCCTAGCTCA | 732 |
| gRNA-#52 | GGUUUGCAGUCAGAUUGGCA | 662 | GGTTTGCAGTCAGATTGGCA | 733 |
| gRNA-#53 | GUUACUUAUUCUCUCUUUGU | 663 | GTTACTTATTCTCTCTTTGT | 734 |
| gRNA-#54 | CUUAUUCUCUCUUUGUUGACUA | 664 | CTTATTCTCTCTTTGTTGACTA | 735 |
| gRNA-#55 | AUAUUUGUAUGGGUUACUUAUU | 665 | ATATTTGTATGGGTTACTTATT | 736 |
| gRNA-#56 | ACUAAGUCAAUAAUCAGAAUCA | 666 | ACTAAGTCAATAATCAGAATCA | 737 |
| gRNA-#57 | GUUUGCAGUCAGAUUGGCAG | 667 | GTTTGCAGTCAGATTGGCAG | 738 |
| gRNA-#58 | GCAGUCAGAUUGGCAGGGAUAA | 668 | GCAGTCAGATTGGCAGGGATAA | 739 |
| gRNA-#59 | UACAAAUAUGAACCUUGUCU | 669 | TACAAATATGAACCTTGTCT | 740 |
| gRNA-#60 | UACUCACUUCUCCUGAGCUA | 670 | TACTCACTTCTCCTGAGCTA | 741 |
| gRNA-#61 | UAUAAAAGCCCCAGGCUGGG | 671 | TATAAAAGCCCCAGGCTGGG | 742 |
| gRNA-#62 | UCACUUCUCCUGAGCUAGGC | 672 | TCACTTCTCCTGAGCTAGGC | 743 |
| gRNA-#63 | UCAGAUUGGCAGGGAUAAGC | 673 | TCAGATTGGCAGGGATAAGC | 744 |
| gRNA-#64 | UCAGGAGAAGUGAGUAUAAA | 674 | TCAGGAGAAGTGAGTATAAA | 745 |
| gRNA-#65 | UCUGACUGCAAACCUGCUGAU | 675 | TCTGACTGCAAACCTGCTGAT | 746 |
| gRNA-#66 | UGAGCUAGGCUGCUUAUCCC | 676 | TGAGCTAGGCTGCTTATCCC | 747 |
| gRNA-#67 | UGCCAAUCUGACUGCAAACC | 677 | TGCCAATCTGACTGCAAACC | 748 |
| gRNA-#68 | UGCUCUAAUCUCUCUAGACA | 678 | TGCTCTAATCTCTCTAGACA | 749 |
| gRNA-#69 | UGUGAUGGCUGCUCCCAGCC | 679 | TGTGATGGCTGCTCCCAGCC | 750 |
| gRNA-#70 | UUGGCAGGGAUAAGCAGCCU | 680 | TTGGCAGGGATAAGCAGCCT | 751 |
| gRNA-#71 | UUUUAUACUCACUUCUCCUG | 681 | TTTTATACTCACTTCTCCTG | 752 |

TABLE 2C
Exemplary human TTR target site sequences and base editor + guide RNA combinations.

| gRNA | | Cas | Editor | Editing | | SEQ ID |
|---|---|---|---|---|---|---|
| Name | Editor Name | Name | Alias | Strategy | Target Site + PAM Sequence | NO |
| gRNA1594 | CBE_NGC_20 nt_4- | spCas9 | spCas9 NGC | Splice Site | CAACTTACCCAGAGGCAAATGGC | 583 |
| | 9_009 | | CBE | | | |
| gRNA1594 | ABE_NGC_20 nt_3- | spCas9 | spCas9 NGC | Splice Site | CAACTTACCCAGAGGCAAATGGC | 583 |
| | 9_008 | | ABE | | | |
| gRNA1594 | ABE_NGC_20 nt_3- | spCas9 | spCas9 NGC | Splice Site | CAACTTACCCAGAGGCAAATGGC | 583 |
| | 12_020 | | IBE | | | |
| gRNA1595 | CBE_NGC_20 nt_4- | spCas9 | spCas9 NGC | Stop Codon | AATGGCTCCCAGGTGTCATCAGC | 584 |
| | 9_009 | | CBE | | | |
| gRNA1596 | CBE_NGC_20 nt_4- | spCas9 | spCas9 NGC | Stop Codon | GGCTCCCAGGTGTCATCAGCAGC | 585 |
| | 9_009 | | CBE | | | |
| gRNA1597 | ABE_NGC_20 nt_3- | spCas9 | spCas9 NGC | Splice Site | CTCTCATAGGTGGTATTCACAGC | 586 |
| | 9_008 | | ABE | | | |
| gRNA1597 | ABE_NGC_20 nt_3- | spCas9 | spCas9 NGC | Splice Site | CTCTCATAGGTGGTATTCACAGC | 586 |
| | 12_020 | | IBE | | | |
| gRNA1598 | ABE_NGG_20 nt_3- | spCas9 | spCas9 IBE | Splice Site | TATAGGAAAACCAGTGAGTCTGG | 587 |
| | 12_018 | | | | | |
| gRNA1599 | ABE_NGG_20 nt_3- | spCas9 | spCas9 IBE | Splice Site | TACTCACCTCTGCATGCTCATGG | 588 |
| | 12_018 | | | | | |
| gRNA1600 | ABE_NGG_20 nt_3- | spCas9 | spCas9 IBE | Splice Site | GCAACTTACCCAGAGGCAAATGG | 589 |
| | 12_018 | | | | | |
| gRNA1601 | ABE_NGC_20 nt_3- | spCas9 | spCas9 NGC | Splice Site | TCTGTATACTCACCTCTGCATGC | 590 |
| | 12_020 | | IBE | | | |
| gRNA1602 | ABE_NGC_20 nt_3- | spCas9 | spCas9 NGC | Splice Site | GAAACACTCACCGTAGGGCCAGC | 591 |
| | 12_020 | | IBE | | | |
| gRNA1603 | ABE_NGA_20 nt_3- | spCas9 | spCas9 VRQR | Splice Site | CTCTACACCCAGGGCACCGGTGA | 592 |
| | 12_019 | | IBE | | | |
| gRNA1604 | ABE_NGA_20 nt_3- | spCas9 | spCas9 VRQR | Splice Site | ACACCTTATAGGAAAACCAGTGA | 593 |
| | 12_019 | | IBE | | | |
| gRNA1605 | ABE_NGA_20 nt_3- | spCas9 | spCas9 VRQR | Splice Site | ATAGGAAAACCAGTGAGTCTGGA | 594 |
| | 12_019 | | IBE | | | |
| gRNA1606 | ABE_NGA_20 nt_3- | spCas9 | spCas9 VRQR | Splice Site | ACTCACCTCTGCATGCTCATGGA | 595 |
| | 12_019 | | IBE | | | |
| gRNA1607 | ABE_NGA_20 nt_3- | spCas9 | spCas9 VRQR | Splice Site | CTCACCGTAGGGCCAGCCTCAGA | 596 |
| | 12_019 | | IBE | | | |
| gRNA1746 | ABE_NGA_20 nt_3- | TTR | spCas9 | spCas9 | AACCTGCTGATTCTGATTATTGA | 871 |
| | 9_005 | Promoter | | VRQR | | |
| | | | | ABE | | |
| gRNA1746 | CBE_NGA_20 nt_4- | TTR | spCas9 | spCas9 | AACCTGCTGATTCTGATTATTGA | 872 |
| | 9_006 | Promoter | | VRQR | | |
| | | | | CBE | | |
| gRNA1746 | ABE_NGA_20 nt_3- | TTR | spCas9 | spCas9 | AACCTGCTGATTCTGATTATTGA | 873 |
| | 12_019 | Promoter | | VRQR IBE | | |
| gRNA1747 | ABE_NNRRT_21 nt_5- | TTR | saCas9 | saCas9 | AAGAGAGAATAAGTAACCCATACAAA | 874 |
| | 14_014 | Promoter | | KKH ABE | T | |
| gRNA1747 | CBE_NNRRT_21 nt_3- | TTR | saCas9 | saCas9 | AAGAGAGAATAAGTAACCCATACAAA | 875 |
| | 12_015 | Promoter | | KKH CBE | T | |
| gRNA1748 | ABE_NNGRRT_21 nt_5- | TTR | saCas9 | saCas9 | AAGCAGCCTAGCTCAGGAGAAGTGAG | 876 |
| | 14_011 | Promoter | | ABE | T | |
| gRNA1748 | CBE_NNGRRT_21 nt_3- | TTR | saCas9 | saCas9 | AAGCAGCCTAGCTCAGGAGAAGTGAG | 877 |
| | 12_012 | Promoter | | CBE | T | |
| gRNA1749 | ABE_NGA_20 nt_3- | TTR | spCas9 | spCas9 | AAGTCCACTCATTCTTGGCAGGA | 878 |
| | 9_005 | Promoter | | VRQR | | |
| | | | | ABE | | |
| gRNA1749 | CBE_NGA_20 nt_4- | TTR | spCas9 | spCas9 | AAGTCCACTCATTCTTGGCAGGA | 879 |
| | 9_006 | Promoter | | VRQR | | |
| | | | | CBE | | |
| gRNA1749 | ABE_NGA_20 nt_3- | TTR | spCas9 | spCas9 | AAGTCCACTCATTCTTGGCAGGA | 880 |
| | 12_019 | Promoter | | VRQR IBE | | |
| gRNA1750 | ABE_NNGRRT_21 nt_5- | TTR | saCas9 | saCas9 | ACGATGAGAAGCCATCCTGCCAAGAA | 881 |
| | 14_011 | Promoter | | ABE | T | |
| gRNA1750 | CBE_NNGRRT_21 nt_3- | TTR | saCas9 | saCas9 | ACGATGAGAAGCCATCCTGCCAAGAA | 882 |
| | 12_012 | Promoter | | CBE | T | |
| gRNA1751 | ABE_NGG_20 nt_3- | TTR | spCas9 | spCas9 | AGACAAGGTTCATATTTGTATGG | 883 |
| | 9_002 | Promoter | | ABE | | |
| gRNA1751 | CBE_NGG_20 nt_4- | TTR | spCas9 | spCas9 | AGACAAGGTTCATATTTGTATGG | 884 |
| | 9_003 | Promoter | | CBE | | |
| gRNA1751 | ABE_NGG_20 nt_3- | TTR | spCas9 | spCas9 IBE | AGACAAGGTTCATATTTGTATGG | 885 |
| | 12_018 | Promoter | | | | |
| gRNA1752 | ABE_NGA_20 nt_3- | TTR | spCas9 | spCas9 | AGGCTGGGAGCAGCCATCACAGA | 886 |
| | 9_005 | Promoter | | VRQR | | |
| | | | | ABE | | |
| gRNA1752 | CBE_NGA_20 nt_4- | TTR | spCas9 | spCas9 | AGGCTGGGAGCAGCCATCACAGA | 887 |
| | 9_006 | Promoter | | VRQR | | |
| | | | | CBE | | |
| gRNA1752 | ABE_NGA_20 nt_3- | TTR | spCas9 | spCas9 | AGGCTGGGAGCAGCCATCACAGA | 888 |
| | 12_019 | Promoter | | VRQR IBE | | |
| gRNA1753 | ABE_NGA_20 nt_3- | TTR | spCas9 | spCas9 | ATAAGTAACCCATACAAATATGA | 889 |
| | 9_005 | Promoter | | VRQR | | |
| | | | | ABE | | |
| gRNA1753 | CBE_NGA_20 nt_4- | TTR | spCas9 | spCas9 | ATAAGTAACCCATACAAATATGA | 890 |
| | 9_006 | Promoter | | VRQR | | |
| | | | | CBE | | |
| gRNA1753 | ABE_NGA_20 nt_3- | TTR | spCas9 | spCas9 | ATAAGTAACCCATACAAATATGA | 891 |
| | 12_019 | Promoter | | VRQR IBE | | |
| gRNA1754 | ABE_NGG_20 nt_3- | TTR | spCas9 | spCas9 | ATACTCACTTCTCCTGAGCTAGG | 892 |
| | 9_002 | Promoter | | ABE | | |
| gRNA1754 | CBE_NGG_20 nt_4- | TTR | spCas9 | spCas9 | ATACTCACTTCTCCTGAGCTAGG | 893 |
| | 9_003 | Promoter | | CBE | | |
| gRNA1754 | ABE_NGG_20 nt_3- | TTR | spCas9 | spCas9 IBE | ATACTCACTTCTCCTGAGCTAGG | 894 |
| | 12_018 | Promoter | | | | |
| gRNA1755 | ABE_NGA_20 nt_3- | TTR | spCas9 | spCas9 | ATTATTGACTTAGTCAACAAAGA | 895 |
| | 9_005 | Promoter | | VRQR | | |
| | | | | ABE | | |
| gRNA1755 | CBE_NGA_20 nt_4- | TTR | spCas9 | spCas9 | ATTATTGACTTAGTCAACAAAGA | 896 |
| | 9_006 | Promoter | | VRQR | | |
| | | | | CBE | | |
| gRNA1755 | ABE_NGA_20 nt_3- | TTR | spCas9 | spCas9 | ATTATTGACTTAGTCAACAAAGA | 897 |
| | 12_019 | Promoter | | VRQR IBE | | |
| gRNA1756 | ABE_NGA_20 nt_3- | TTR | spCas9 | spCas9 | CAAATATGAACCTTGTCTAGAGA | 898 |
| | 9_005 | Promoter | | VRQR | | |
| | | | | ABE | | |
| gRNA1756 | CBE_NGA_20 nt_4- | TTR | spCas9 | spCas9 | CAAATATGAACCTTGTCTAGAGA | 899 |
| | 9_006 | Promoter | | VRQR | | |
| | | | | CBE | | |
| gRNA1756 | ABE_NGA_20 nt_3- | TTR | spCas9 | spCas9 | CAAATATGAACCTTGTCTAGAGA | 900 |
| | 12_019 | Promoter | | VRQR IBE | | |
| gRNA1757 | ABE_NNGRRT_21 nt_5- | TTR | saCas9 | saCas9 | CAGAAGTCCACTCATTCTTGGCAGGAT | 901 |
| | 14_011 | Promoter | | ABE | | |
| gRNA1757 | CBE_NNGRRT_21 nt_3- | TTR | saCas9 | saCas9 | CAGAAGTCCACTCATTCTTGGCAGGAT | 902 |
| | 12_012 | Promoter | | CBE | | |
| gRNA1758 | ABE_NNRRT_21 nt_5- | TTR | saCas9 | saCas9 | CAGGCTGGGAGCAGCCATCACAGAAG | 903 |
| | 14_014 | Promoter | | KKH ABE | T | |
| gRNA1758 | CBE_NNRRT_21 nt_3- | TTR | saCas9 | saCas9 | CAGGCTGGGAGCAGCCATCACAGAAG | 904 |
| | 12_015 | Promoter | | KKH CBE | T | |
| gRNA1759 | ABE_NGA_20 nt_3- | TTR | spCas9 | spCas9 | CCATCCTGCCAAGAATGAGTGGA | 905 |
| | 9_005 | Promoter | | VRQR | | |
| | | | | ABE | | |
| gRNA1759 | CBE_NGA_20 nt_4- | TTR | spCas9 | spCas9 | CCATCCTGCCAAGAATGAGTGGA | 906 |
| | 9_006 | Promoter | | VRQR | | |
| | | | | CBE | | |
| gRNA1759 | ABE_NGA_20 nt_3- | TTR | spCas9 | spCas9 | CCATCCTGCCAAGAATGAGTGGA | 907 |
| | 12_019 | Promoter | | VRQR IBE | | |
| gRNA1760 | ABE_NNRRT_21 nt_5- | TTR | saCas9 | saCas9 | CCTGCTGATTCTGATTATTGACTTAGT | 908 |
| | 14_014 | Promoter | | KKH ABE | | |
| gRNA1760 | CBE_NNNRRT_21 nt_3- | TTR | saCas9 | saCas9 | CCTGCTGATTCTGATTATTGACTTAGT | 909 |
| | 12_015 | Promoter | | KKH CBE | | |
| gRNA1761 | ABE_NNNRRT_21 nt_5- | TTR | saCas9 | saCas9 | CGATGCTCTAATCTCTCTAGACAAGGT | 910 |
| | 14_014 | Promoter | | KKH ABE | | |
| gRNA1761 | CBE_NNNRRT_21 nt_3- | TTR | saCas9 | saCas9 | CGATGCTCTAATCTCTCTAGACAAGGT | 911 |
| | 12_015 | Promoter | | KKH CBE | | |
| gRNA1762 | ABE_NNNRRT_21 nt_5- | TTR | saCas9 | saCas9 | CTAAGTCAATAATCAGAATCAGCAGGT | 912 |
| | 14_014 | Promoter | | KKH ABE | | |
| gRNA1762 | CBE_NNRRT_21 nt_3- | TTR | saCas9 | saCas9 | CTAAGTCAATAATCAGAATCAGCAGGT | 913 |
| | 12_015 | Promoter | | KKH CBE | | |
| gRNA1763 | ABE_NNGRRT_21 nt_5- | TTR | saCas9 | saCas9 | CTAGACAAGGTTCATATTTGTATGGGT | 914 |
| | 14_011 | Promoter | | ABE | | |
| gRNA1763 | CBE_NNGRRT_21 nt_3- | TTR | saCas9 | saCas9 | CTAGACAAGGTTCATATTTGTATGGGT | 915 |
| | 12_012 | Promoter | | CBE | | |
| gRNA1764 | ABE_NGA_20 nt_3- | TTR | spCas9 | spCas9 | GAACCTTGTCTAGAGAGATTAGA | 916 |
| | 9_005 | Promoter | | VRQR | | |
| | | | | ABE | | |
| gRNA1764 | CBE_NGA_20 nt_4- | TTR | spCas9 | spCas9 | GAACCTTGTCTAGAGAGATTAGA | 917 |
| | 9_006 | Promoter | | VRQR | | |
| | | | | CBE | | |
| gRNA1764 | ABE_NGA_20 nt_3- | TTR | spCas9 | spCas9 | GAACCTTGTCTAGAGAGATTAGA | 918 |
| | 12_019 | Promoter | | VRQR IBE | | |
| gRNA1765 | ABE_NGG_20 nt_3- | TTR | spCas9 | spCas9 | GAAGTCCACTCATTCTTGGCAGG | 919 |
| | 9_002 | Promoter | | ABE | | |
| gRNA1765 | CBE_NGG_20 nt_4- | TTR | spCas9 | spCas9 | GAAGTCCACTCATTCTTGGCAGG | 920 |
| | 9_003 | Promoter | | CBE | | |
| gRNA1765 | ABE_NGG_20 nt_3- | TTR | spCas9 | spCas9 IBE | GAAGTCCACTCATTCTTGGCAGG | 921 |
| | 12_018 | Promoter | | | | |
| gRNA1766 | ABE_NGA_20 nt_3- | TTR | spCas9 | spCas9 | GAATCAGCAGGTTTGCAGTCAGA | 922 |
| | 9_005 | Promoter | | VRQR | | |
| | | | | ABE | | |
| gRNA1766 | CBE_NGA_20 nt_4- | TTR | spCas9 | spCas9 | GAATCAGCAGGTTTGCAGTCAGA | 923 |
| | 9_006 | Promoter | | VRQR | | |
| | | | | CBE | | |
| gRNA1766 | ABE_NGA_20 nt_3- | TTR | spCas9 | spCas9 | GAATCAGCAGGTTTGCAGTCAGA | 924 |
| | 12_019 | Promoter | | VRQR IBE | | |
| gRNA1767 | ABE_NGG_20 nt_3- | TTR | spCas9 | spCas9 | GAATGAGTGGACTTCTGTGATGG | 925 |
| | 9_002 | Promoter | | ABE | | |
| gRNA1767 | CBE_NGG_20 nt_4- | TTR | spCas9 | spCas9 | GAATGAGTGGACTTCTGTGATGG | 926 |
| | 9_003 | Promoter | | CBE | | |
| gRNA1767 | ABE_NGG_20 nt_3- | TTR | spCas9 | spCas9 IBE | GAATGAGTGGACTTCTGTGATGG | 927 |
| | 12_018 | Promoter | | | | |
| gRNA1768 | ABE_NGA_20 nt_3- | TTR | spCas9 | spCas9 | GACTGCAAACCTGCTGATTCTGA | 928 |
| | 9_005 | Promoter | | VRQR | | |
| | | | | ABE | | |
| gRNA1768 | CBE_NGA_20 nt_4- | TTR | spCas9 | spCas9 | GACTGCAAACCTGCTGATTCTGA | 929 |
| | 9_006 | Promoter | | VRQR | | |
| | | | | CBE | | |
| gRNA1768 | ABE_NGA_20 nt_3- | TTR | spCas9 | spCas9 | GACTGCAAACCTGCTGATTCTGA | 930 |
| | 12_019 | Promoter | | VRQR IBE | | |
| gRNA1769 | ABE_NNRRT_21 nt_5- | TTR | saCas9 | saCas9 | GACTTAGTCAACAAAGAGAGAATAAG | 931 |
| | 14_014 | Promoter | | KKH ABE | T | |
| gRNA1769 | CBE_NNRRT_21 nt_3- | TTR | saCas9 | saCas9 | GACTTAGTCAACAAAGAGAGAATAAG | 932 |
| | 12_015 | Promoter | | KKH CBE | T | |
| gRNA1770 | ABE_NGA_20 nt_3- | TTR | spCas9 | spCas9 | GATAAGCAGCCTAGCTCAGGAGA | 933 |
| | 9_005 | Promoter | | VRQR | | |
| | | | | ABE | | |
| gRNA1770 | CBE_NGA_20 nt_4- | TTR | spCas9 | spCas9 | GATAAGCAGCCTAGCTCAGGAGA | 934 |
| | 9_006 | Promoter | | VRQR | | |
| | | | | CBE | | |
| gRNA1770 | ABE_NGA_20 nt_3- | TTR | spCas9 | spCas9 | GATAAGCAGCCTAGCTCAGGAGA | 935 |
| | 12_019 | Promoter | | VRQR IBE | | |
| gRNA1771 | ABE_NGA_20 nt_3- | TTR | spCas9 | spCas9 | GATGAGAAGCCATCCTGCCAAGA | 936 |
| | 9_005 | Promoter | | VRQR | | |
| | | | | ABE | | |
| gRNA1771 | CBE_NGA_20 nt_4- | TTR | spCas9 | spCas9 | GATGAGAAGCCATCCTGCCAAGA | 937 |
| | 9_006 | Promoter | | VRQR | | |
| | | | | CBE | | |
| gRNA1771 | ABE_NGA_20 nt_3- | TTR | spCas9 | spCas9 | GATGAGAAGCCATCCTGCCAAGA | 938 |
| | 12_019 | Promoter | | VRQR IBE | | |
| gRNA1772 | ABE_NGG_20 nt_3- | TTR | spCas9 | spCas9 | GCCATCCTGCCAAGAATGAGTGG | 939 |
| | 9_002 | Promoter | | ABE | | |
| gRNA1772 | CBE_NGG_20 nt_4- | TTR | spCas9 | spCas9 | GCCATCCTGCCAAGAATGAGTGG | 940 |
| | 9_003 | Promoter | | CBE | | |
| gRNA1772 | ABE_NGG_20 nt_3- | TTR | spCas9 | spCas9 IBE | GCCATCCTGCCAAGAATGAGTGG | 941 |
| | 12_018 | Promoter | | | | |
| gRNA1773 | ABE_NGA_20 nt_3- | TTR | spCas9 | spCas9 | GCTTTTATACTCACTTCTCCTGA | 942 |
| | 9_005 | Promoter | | VRQR | | |
| | | | | ABE | | |
| gRNA1773 | CBE_NGA_20 nt_4- | TTR | spCas9 | spCas9 | GCTTTTATACTCACTTCTCCTGA | 943 |
| | 9_006 | Promoter | | VRQR | | |
| | | | | CBE | | |
| gRNA1773 | ABE_NGA_20 nt_3- | TTR | spCas9 | spCas9 | GCTTTTATACTCACTTCTCCTGA | 944 |
| | 12_019 | Promoter | | VRQR IBE | | |
| gRNA1774 | ABE_NNRRT_21 nt_5- | TTR | saCas9 | saCas9 | GGATAAGCAGCCTAGCTCAGGAGAAG | 945 |
| | 14_014 | Promoter | | KKH ABE | T | |
| gRNA1774 | CBE_NNRRT_21 nt_3- | TTR | saCas9 | saCas9 | GGATAAGCAGCCTAGCTCAGGAGAAG | 946 |
| | 12_015 | Promoter | | KKH CBE | T | |
| gRNA1775 | ABE_NGG_20 nt_3- | TTR | spCas9 | spCas9 | GTCTAGAGAGATTAGAGCATCGG | 947 |
| | 9_002 | Promoter | | ABE | | |
| gRNA1775 | CBE_NGG_20 nt_4- | TTR | spCas9 | spCas9 | GTCTAGAGAGATTAGAGCATCGG | 948 |
| | 9_003 | Promoter | | CBE | | |
| gRNA1775 | ABE_NGG_20 nt_3- | TTR | spCas9 | spCas9 IBE | GTCTAGAGAGATTAGAGCATCGG | 949 |
| | 12_018 | Promoter | | | | |
| gRNA1776 | ABE_NGG_20 nt_3- | TTR | spCas9 | spCas9 | GTGATGGCTGCTCCCAGCCTGGG | 950 |
| | 9_002 | Promoter | | ABE | | |
| gRNA1776 | CBE_NGG_20 nt_4- | TTR | spCas9 | spCas9 | GTGATGGCTGCTCCCAGCCTGGG | 951 |
| | 9_003 | Promoter | | CBE | | |
| gRNA1776 | ABE_NGG_20 nt_3- | TTR | spCas9 | spCas9 IBE | GTGATGGCTGCTCCCAGCCTGGG | 952 |
| | 12_018 | Promoter | | | | |
| gRNA1777 | ABE_NNRRT_21 nt_5- | TTR | saCas9 | saCas9 | TACTTATTCTCTCTTTGTTGACTAAGT | 953 |
| | 14_014 | Promoter | | KKH ABE | | |
| gRNA1777 | CBE_NNRRT_21 nt_3- | TTR | saCas9 | saCas9 | TACTTATTCTCTCTTTGTTGACTAAGT | 954 |
| | 12_015 | Promoter | | KKH CBE | | |
| gRNA1778 | ABE_NNRRT_21 nt_5- | TTR | saCas9 | saCas9 | TATTCTCTCTTTGTTGACTAAGTCAAT | 955 |
| | 14_014 | Promoter | | KKH ABE | | |
| gRNA1778 | CBE_NNRRT_21 nt_3- | TTR | saCas9 | saCas9 | TATTCTCTCTTTGTTGACTAAGTCAAT | 956 |
| | 12_015 | Promoter | | KKH CBE | | |
| gRNA1779 | ABE_NGA_20 nt_3- | TTR | spCas9 | spCas9 | TATTGACTTAGTCAACAAAGAGA | 957 |
| | 9_005 | Promoter | | VRQR | | |
| | | | | ABE | | |
| gRNA1779 | CBE_NGA_20 nt_4- | TTR | spCas9 | spCas9 | TATTGACTTAGTCAACAAAGAGA | 958 |
| | 9_006 | Promoter | | VRQR | | |
| | | | | CBE | | |
| gRNA1779 | ABE_NGA_20 nt_3- | TTR | spCas9 | spCas9 | TATTGACTTAGTCAACAAAGAGA | 959 |
| | 12_019 | Promoter | | VRQR IBE | | |
| gRNA1780 | ABE_NNGRRT_21 nt_5- | TTR | saCas9 | saCas9 | TATTGACTTAGTCAACAAAGAGAGAAT | 960 |
| | 14_011 | Promoter | | ABE | | |
| gRNA1780 | CBE_NNGRRT_21 nt_3- | TTR | saCas9 | saCas9 | TATTGACTTAGTCAACAAAGAGAGAAT | 961 |
| | 12_012 | Promoter | | CBE | | |
| gRNA1781 | ABE_NNRRT_21 nt_5- | TTR | saCas9 | saCas9 | TCAGAATCAGCAGGTTTGCAGTCAGAT | 962 |
| | 14_014 | Promoter | | KKH ABE | | |
| gRNA1781 | CBE_NNRRT_21 nt_3- | TTR | saCas9 | saCas9 | TCAGAATCAGCAGGTTTGCAGTCAGAT | 963 |
| | 12_015 | Promoter | | KKH CBE | | |
| gRNA1782 | ABE_NGG_20 nt_3- | TTR | spCas9 | spCas9 | TCCACTCATTCTTGGCAGGATGG | 964 |
| | 9_002 | Promoter | | ABE | | |
| gRNA1782 | CBE_NGG_20 nt_4- | TTR | spCas9 | spCas9 | TCCACTCATTCTTGGCAGGATGG | 965 |
| | 9_003 | Promoter | | CBE | | |
| gRNA1782 | ABE_NGG_20 nt_3- | TTR | spCas9 | spCas9 IBE | TCCACTCATTCTTGGCAGGATGG | 966 |
| | 12_018 | Promoter | | | | |
| gRNA1783 | ABE_NNRRT_21 nt_5- | TTR | saCas9 | saCas9 | TCTCTCTTTGTTGACTAAGTCAATAAT | 967 |
| | 14_014 | Promoter | | KKH ABE | | |
| gRNA1783 | CBE_NNRRT_21 nt_3- | TTR | saCas9 | saCas9 | TCTCTCTTTGTTGACTAAGTCAATAAT | 968 |
| | 12_015 | Promoter | | KKH CBE | | |
| gRNA1784 | ABE_NNGRRT_21 nt_5- | TTR | saCas9 | saCas9 | TGAGAAGCCATCCTGCCAAGAATGAGT | 969 |
| | 14_011 | Promoter | | ABE | | |
| gRNA1784 | CBE_NNGRRT_21 nt_3- | TTR | saCas9 | saCas9 | TGAGAAGCCATCCTGCCAAGAATGAGT | 970 |
| | 12_012 | Promoter | | CBE | | |
| gRNA1785 | ABE_NNRRT_21 nt_5- | TTR | saCas9 | saCas9 | TGAGCTAGGCTGCTTATCCCTGCCAAT | 971 |
| | 14_014 | Promoter | | KKH ABE | | |
| gRNA1785 | CBE_NNRRT_21 nt_3- | TTR | saCas9 | saCas9 | TGAGCTAGGCTGCTTATCCCTGCCAAT | 972 |
| | 12_015 | Promoter | | KKH CBE | | |
| gRNA1786 | ABE_NGG_20 nt_3- | TTR | spCas9 | spCas9 | TGAGTATAAAAGCCCCAGGCTGG | 973 |
| | 9_002 | Promoter | | ABE | | |
| gRNA1786 | CBE_NGG_20 nt_4- | TTR | spCas9 | spCas9 | TGAGTATAAAAGCCCCAGGCTGG | 974 |
| | 9_003 | Promoter | | CBE | | |
| gRNA1786 | ABE_NGG_20 nt_3- | TTR | spCas9 | spCas9 IBE | TGAGTATAAAAGCCCCAGGCTGG | 975 |
| | 12_018 | Promoter | | | | |
| gRNA1787 | ABE_NGG_20 nt_3- | TTR | spCas9 | spCas9 | TGATGGCTGCTCCCAGCCTGGGG | 976 |
| | 9_002 | Promoter | | ABE | | |
| gRNA1787 | CBE_NGG_20 nt_4- | TTR | spCas9 | spCas9 | TGATGGCTGCTCCCAGCCTGGGG | 977 |
| | 9_003 | Promoter | | CBE | | |
| gRNA1787 | ABE_NGG_20 nt_3- | TTR | spCas9 | spCas9 IBE | TGATGGCTGCTCCCAGCCTGGGG | 978 |
| | 12_018 | Promoter | | | | |
| gRNA1788 | ABE_NNRRT_21 nt_5- | TTR | saCas9 | saCas9 | TGCCAAGAATGAGTGGACTTCTGTGAT | 979 |
| | 14_014 | Promoter | | KKH ABE | | |
| gRNA1788 | CBE_NNRRT_21 nt_3- | TTR | saCas9 | saCas9 | TGCCAAGAATGAGTGGACTTCTGTGAT | 980 |
| | 12_015 | Promoter | | KKH CBE | | |
| gRNA1789 | ABE_NNRRT_21 nt_5- | TTR | saCas9 | saCas9 | TGCCAATCTGACTGCAAACCTGCTGAT | 981 |
| | 14_014 | Promoter | | KKH ABE | | |
| gRNA1789 | CBE_NNNRRT_21 nt_3- | TTR | saCas9 | saCas9 | TGCCAATCTGACTGCAAACCTGCTGAT | 982 |
| | 12_015 | Promoter | | KKH CBE | | |
| gRNA1790 | ABE_NGA_20 nt_3- | TTR | spCas9 | spCas9 | TGTTGACTAAGTCAATAATCAGA | 983 |
| | 9_005 | Promoter | | VRQR | | |
| | | | | ABE | | |
| gRNA1790 | CBE_NGA_20 nt_4- | TTR | spCas9 | spCas9 | TGTTGACTAAGTCAATAATCAGA | 984 |
| | 9_006 | Promoter | | VRQR | | |
| | | | | CBE | | |
| gRNA1790 | ABE_NGA_20 nt_3- | TTR | spCas9 | spCas9 | TGTTGACTAAGTCAATAATCAGA | 985 |
| | 12_019 | Promoter | | VRQR IBE | | |
| gRNA1791 | ABE_NGA_20 nt_3- | TTR | spCas9 | spCas9 | TTGACTTAGTCAACAAAGAGAGA | 986 |
| | 9_005 | Promoter | | VRQR | | |
| | | | | ABE | | |
| gRNA1791 | CBE_NGA_20 nt_4- | TTR | spCas9 | spCas9 | TTGACTTAGTCAACAAAGAGAGA | 987 |
| | 9_006 | Promoter | | VRQR | | |
| | | | | CBE | | |
| gRNA1791 | ABE_NGA_20 nt_3- | TTR | spCas9 | spCas9 | TTGACTTAGTCAACAAAGAGAGA | 988 |
| | 12_019 | Promoter | | VRQR IBE | | |
| gRNA1792 | ABE_NNGRRT_21 nt_5- | TTR | saCas9 | saCas9 | TTTGTTGACTAAGTCAATAATCAGAAT | 989 |
| | 14_011 | Promoter | | ABE | | |
| gRNA1792 | CBE_NNGRRT_21 nt_3- | TTR | saCas9 | saCas9 | TTTGTTGACTAAGTCAATAATCAGAAT | 990 |
| | 12_012 | Promoter | | CBE | | |
| gRNA-#1 | ABE_NGC_20 nt_3- | TTR | spCas9 | spCas9 | AAAAGCCCCAGGCTGGGAGCAGC | 991 |
| | 9_008 | Promoter | | NGC ABE | | |
| gRNA-#1 | CBE_NGC_20 nt_4- | TTR | spCas9 | spCas9 | AAAAGCCCCAGGCTGGGAGCAGC | 992 |
| | 9_009 | Promoter | | NGC CBE | | |
| gRNA-#1 | ABE_NGC_20 nt_3- | TTR | spCas9 | spCas9 | AAAAGCCCCAGGCTGGGAGCAGC | 993 |
| | 12_020 | Promoter | | NGC IBE | | |
| gRNA-#2 | ABE_NGC_20 nt_3- | TTR | spCas9 | spCas9 | AAGTGAGTATAAAAGCCCCAGGC | 994 |
| | 9_008 | Promoter | | NGC ABE | | |
| gRNA-#2 | CBE_NGC_20 nt_4- | TTR | spCas9 | spCas9 | AAGTGAGTATAAAAGCCCCAGGC | 995 |
| | 9_009 | Promoter | | NGC CBE | | |
| gRNA-#2 | ABE_NGC_20 nt_3- | TTR | spCas9 | spCas9 | AAGTGAGTATAAAAGCCCCAGGC | 996 |
| | 12_020 | Promoter | | NGC IBE | | |
| gRNA-#3 | ABE_NNNRRT_21 nt_5- | TTR | saCas9 | saCas9 | AATAATCAGAATCAGCAGGTTTGCAGT | 997 |
| | 14_014 | Promoter | | KKH ABE | | |
| gRNA-#3 | CBE_NNRRT_21 nt_3- | TTR | saCas9 | saCas9 | AATAATCAGAATCAGCAGGTTTGCAGT | 998 |
| | 12_015 | Promoter | | KKH CBE | | |
| gRNA-#4 | CBE_NGA_20 nt_4- | TTR | spCas9 | spCas9 | AATATGAACCTTGTCTAGAGAGA | 999 |
| | 9_006 | Promoter | | VRQR | | |
| | | | | CBE | | |
| gRNA-#4 | ABE_NGA_20 nt_3- | TTR | spCas9 | spCas9 | AATATGAACCTTGTCTAGAGAGA | 1000 |
| | 9_005 | Promoter | | VRQR | | |
| | | | | ABE | | |
| gRNA-#4 | ABE_NGA_20 nt_3- | TTR | spCas9 | spCas9 | AATATGAACCTTGTCTAGAGAGA | 1001 |
| | 12_019 | Promoter | | VRQR IBE | | |
| gRNA-#5 | ABE_NGC_20 nt_3- | TTR | spCas9 | spCas9 | AATGAGTGGACTTCTGTGATGGC | 1002 |
| | 9_008 | Promoter | | NGC ABE | | |
| gRNA-#5 | CBE_NGC_20 nt_4- | TTR | spCas9 | spCas9 | AATGAGTGGACTTCTGTGATGGC | 1003 |
| | 9_009 | Promoter | | NGC CBE | | |
| gRNA-#5 | ABE_NGC_20 nt_3- | TTR | spCas9 | spCas9 | AATGAGTGGACTTCTGTGATGGC | 1004 |
| | 12_020 | Promoter | | NGC IBE | | |
| gRNA-#6 | ABE_NNRRT_21 nt_5- | TTR | saCas9 | saCas9 | ACAAATATGAACCTTGTCTAGAGAGAT | 1005 |
| | 14_014 | Promoter | | KKH ABE | | |
| gRNA-#6 | CBE_NNRRT_21 nt_3- | TTR | saCas9 | saCas9 | ACAAATATGAACCTTGTCTAGAGAGAT | 1006 |
| | 12_015 | Promoter | | KKH CBE | | |
| gRNA-#7 | ABE_NGC_20 nt_3- | TTR | spCas9 | spCas9 | ACAGAAGTCCACTCATTCTTGGC | 1007 |
| | 9_008 | Promoter | | NGC ABE | | |
| gRNA-#7 | CBE_NGC_20 nt_4- | TTR | spCas9 | spCas9 | ACAGAAGTCCACTCATTCTTGGC | 1008 |
| | 9_009 | Promoter | | NGC CBE | | |
| gRNA-#7 | ABE_NGC_20 nt_3- | TTR | spCas9 | spCas9 | ACAGAAGTCCACTCATTCTTGGC | 1009 |
| | 12_020 | Promoter | | NGC IBE | | |
| gRNA-#8 | ABE_NGC_20 nt_3- | TTR | spCas9 | spCas9 | ACCTTGTCTAGAGAGATTAGAGC | 1010 |
| | 9_008 | Promoter | | NGC ABE | | |
| gRNA-#8 | CBE_NGC_20 nt_4- | TTR | spCas9 | spCas9 | ACCTTGTCTAGAGAGATTAGAGC | 1011 |
| | 9_009 | Promoter | | NGC CBE | | |
| gRNA-#8 | ABE_NGC_20 nt_3- | TTR | spCas9 | spCas9 | ACCTTGTCTAGAGAGATTAGAGC | 1012 |
| | 12_020 | Promoter | | NGC IBE | | |
| gRNA-#9 | CBE_NGA_20 nt_4- | TTR | spCas9 | spCas9 | AGAAGCCATCCTGCCAAGAATGA | 1013 |
| | 9_006 | Promoter | | VRQR | | |
| | | | | CBE | | |
| gRNA-#9 | ABE_NGA_20 nt_3- | TTR | spCas9 | spCas9 | AGAAGCCATCCTGCCAAGAATGA | 1014 |
| | 9_005 | Promoter | | VRQR | | |
| | | | | ABE | | |
| gRNA-#9 | ABE_NGA_20 nt_3- | TTR | spCas9 | spCas9 | AGAAGCCATCCTGCCAAGAATGA | 1015 |
| | 12_019 | Promoter | | VRQR IBE | | |
| gRNA-#10 | ABE_NGC_20 nt_3- | TTR | spCas9 | spCas9 | AGCAGGTTTGCAGTCAGATTGGC | 1016 |
| | 9_008 | Promoter | | NGC ABE | | |
| gRNA-#10 | CBE_NGC_20 nt_4- | TTR | spCas9 | spCas9 | AGCAGGTTTGCAGTCAGATTGGC | 1017 |
| | 9_009 | Promoter | | NGC CBE | | |
| gRNA-#10 | ABE_NGC_20 nt_3- | TTR | spCas9 | spCas9 | AGCAGGTTTGCAGTCAGATTGGC | 1018 |
| | 12_020 | Promoter | | NGC IBE | | |
| gRNA-#11 | ABE_NGG_20 nt_3- | TTR | spCas9 | spCas9 | AGGGATAAGCAGCCTAGCTCAGG | 1019 |
| | 9_002 | Promoter | | ABE | | |
| gRNA-#11 | CBE_NGG_20 nt_4- | TTR | spCas9 | spCas9 | AGGGATAAGCAGCCTAGCTCAGG | 1020 |
| | 9_003 | Promoter | | CBE | | |
| gRNA-#11 | ABE_NGG_20 nt_3- | TTR | spCas9 | spCas9 IBE | AGGGATAAGCAGCCTAGCTCAGG | 1021 |
| | 12_018 | Promoter | | | | |
| gRNA-#12 | ABE_NGG_20 nt_3- | TTR | spCas9 | spCas9 | AGGTTTGCAGTCAGATTGGCAGG | 1022 |
| | 9_002 | Promoter | | ABE | | |
| gRNA-#12 | CBE_NGG_20 nt_4- | TTR | spCas9 | spCas9 | AGGTTTGCAGTCAGATTGGCAGG | 1023 |
| | 9_003 | Promoter | | CBE | | |
| gRNA-#12 | ABE_NGG_20 nt_3- | TTR | spCas9 | spCas9 IBE | AGGTTTGCAGTCAGATTGGCAGG | 1024 |
| | 12_018 | Promoter | | | | |
| gRNA-#13 | CBE_NGA_20 nt_4- | TTR | spCas9 | spCas9 | AGTATAAAAGCCCCAGGCTGGGA | 1025 |
| | 9_006 | Promoter | | VRQR | | |
| | | | | CBE | | |
| gRNA-#13 | ABE_NGA_20 nt_3- | TTR | spCas9 | spCas9 | AGTATAAAAGCCCCAGGCTGGGA | 1026 |
| | 9_005 | Promoter | | VRQR | | |
| | | | | ABE | | |
| gRNA-#13 | ABE_NGA_20 nt_3- | TTR | spCas9 | spCas9 | AGTATAAAAGCCCCAGGCTGGGA | 1027 |
| | 12_019 | Promoter | | VRQR IBE | | |
| gRNA-#14 | ABE_NGG_20 nt_3- | TTR | spCas9 | spCas9 | AGTCAATAATCAGAATCAGCAGG | 1028 |
| | 9_002 | Promoter | | ABE | | |
| gRNA-#14 | CBE_NGG_20 nt_4- | TTR | spCas9 | spCas9 | AGTCAATAATCAGAATCAGCAGG | 1029 |
| | 9_003 | Promoter | | CBE | | |
| gRNA-#14 | ABE_NGG_20 nt_3- | TTR | spCas9 | spCas9 IBE | AGTCAATAATCAGAATCAGCAGG | 1030 |
| | 12_018 | Promoter | | | | |
| gRNA-#15 | ABE_NGC_20 nt_3- | TTR | spCas9 | spCas9 | ATAATCAGAATCAGCAGGTTTGC | 1031 |
| | 9_008 | Promoter | | NGC ABE | | |
| gRNA-#15 | CBE_NGC_20 nt_4- | TTR | spCas9 | spCas9 | ATAATCAGAATCAGCAGGTTTGC | 1032 |
| | 9_009 | Promoter | | NGC CBE | | |
| gRNA-#15 | ABE_NGC_20 nt_3- | TTR | spCas9 | spCas9 | ATAATCAGAATCAGCAGGTTTGC | 1033 |
| | 12_020 | Promoter | | NGC IBE | | |
| gRNA-#16 | ABE_VTTN_22 nt_5- | TTR | cas12b | cas12b | ATTATTGACTTAGTCAACAAAGAGAG | 1034 |
| | 9_017 | Promoter | | ABE | | |
| gRNA-#17 | ABE_VTTN_22 nt_5- | TTR | cas12b | cas12b | ATTCTCTCTTTGTTGACTAAGTCAAT | 1035 |
| | 9_017 | Promoter | | ABE | | |
| gRNA-#18 | ABE_VTTN_22 nt_5- | TTR | cas12b | cas12b | ATTCTGATTATTGACTTAGTCAACAA | 1036 |
| | 9_017 | Promoter | | ABE | | |
| gRNA-#19 | ABE_VTTN_22 nt_5- | TTR | cas12b | cas12b | ATTCTTGGCAGGATGGCTTCTCATCG | 1037 |
| (sgRNA_ | 9_017 | Promoter | | ABE | | |
| 367) | | | | | | |
| gRNA-#20 | ABE_VTTN_22 nt_5- | TTR | cas12b | cas12b | ATTGACTTAGTCAACAAAGAGAGAAT | 1038 |
| | 9_017 | Promoter | | ABE | | |
| gRNA-#21 | ABE_VTTN_22 nt_5- | TTR | cas12b | cas12b | ATTGGCAGGGATAAGCAGCCTAGCTC | 1039 |
| | 9_017 | Promoter | | ABE | | |
| gRNA-#22 | ABE_VTTN_22 nt_5- | TTR | cas12b | cas12b | ATTTGTATGGGTTACTTATTCTCTCT | 1040 |
| | 9_017 | Promoter | | ABE | | |
| gRNA-#23 | CBE_NGA_20 nt_4- | TTR | spCas9 | spCas9 | CAAGAATGAGTGGACTTCTGTGA | 1041 |
| | 9_006 | Promoter | | VRQR | | |
| | | | | CBE | | |
| gRNA-#23 | ABE_NGA_20 nt_3- | TTR | spCas9 | spCas9 | CAAGAATGAGTGGACTTCTGTGA | 1042 |
| | 9_005 | Promoter | | VRQR | | |
| | | | | ABE | | |
| gRNA-#23 | ABE_NGA_20 nt_3- | TTR | spCas9 | spCas9 | CAAGAATGAGTGGACTTCTGTGA | 1043 |
| | 12_019 | Promoter | | VRQR IBE | | |
| gRNA-#24 | CBE_NGA_20 nt_4- | TTR | spCas9 | spCas9 | CAATCTGACTGCAAACCTGCTGA | 1044 |
| | 9_006 | Promoter | | VRQR | | |
| | | | | CBE | | |
| gRNA-#24 | ABE_NGA_20 nt_3- | TTR | spCas9 | spCas9 | CAATCTGACTGCAAACCTGCTGA | 1045 |
| | 9_005 | Promoter | | VRQR | | |
| | | | | ABE | | |
| gRNA-#24 | ABE_NGA_20 nt_3- | TTR | spCas9 | spCas9 | CAATCTGACTGCAAACCTGCTGA | 1046 |
| | 12_019 | Promoter | | VRQR IBE | | |
| gRNA-#25 | ABE_NGG_20 nt_3- | TTR | spCas9 | spCas9 | CACAGAAGTCCACTCATTCTTGG | 1047 |
| | 9_002 | Promoter | | ABE | | |
| gRNA-#25 | CBE_NGG_20 nt_4- | TTR | spCas9 | spCas9 | CACAGAAGTCCACTCATTCTTGG | 1048 |
| | 9_003 | Promoter | | CBE | | |
| gRNA-#25 | ABE_NGG_20 nt_3- | TTR | spCas9 | spCas9 IBE | CACAGAAGTCCACTCATTCTTGG | 1049 |
| | 12_018 | Promoter | | | | |
| gRNA-#26 | ABE_NGC_20 nt_3- | TTR | spCas9 | spCas9 | CAGACGATGAGAAGCCATCCTGC | 1050 |
| | 9_008 | Promoter | | NGC ABE | | |
| gRNA-#26 | CBE_NGC_20 nt_4- | TTR | spCas9 | spCas9 | CAGACGATGAGAAGCCATCCTGC | 1051 |
| | 9_009 | Promoter | | NGC CBE | | |
| gRNA-#26 | ABE_NGC_20 nt_3- | TTR | spCas9 | spCas9 | CAGACGATGAGAAGCCATCCTGC | 1052 |
| | 12_020 | Promoter | | NGC IBE | | |
| gRNA-#27 | ABE_NGG_20 nt_3- | TTR | spCas9 | spCas9 | CAGCAGGTTTGCAGTCAGATTGG | 1053 |
| | 9_002 | Promoter | | ABE | | |
| gRNA-#27 | CBE_NGG_20 nt_4- | TTR | spCas9 | spCas9 | CAGCAGGTTTGCAGTCAGATTGG | 1054 |
| | 9_003 | Promoter | | CBE | | |
| gRNA-#27 | ABE_NGG_20 nt_3- | TTR | spCas9 | spCas9 IBE | CAGCAGGTTTGCAGTCAGATTGG | 1055 |
| | 12_018 | Promoter | | | | |
| gRNA-#28 | ABE_NGC_20 nt_3- | TTR | spCas9 | spCas9 | CAGGATGGCTTCTCATCGTCTGC | 1056 |
| | 9_008 | Promoter | | NGC ABE | | |
| gRNA-#28 | CBE_NGC_20 nt_4- | TTR | spCas9 | spCas9 | CAGGATGGCTTCTCATCGTCTGC | 1057 |
| | 9_009 | Promoter | | NGC CBE | | |
| gRNA-#28 | ABE_NGC_20 nt_3- | TTR | spCas9 | spCas9 | CAGGATGGCTTCTCATCGTCTGC | 1058 |
| | 12_020 | Promoter | | NGC IBE | | |
| gRNA-#29 | ABE_NNGRRT_21 nt_5- | TTR | saCas9 | saCas9 | CAGGTTTGCAGTCAGATTGGCAGGGAT | 1059 |
| | 14_011 | Promoter | | ABE | | |
| gRNA-#29 | CBE_NNGRRT_21 nt_3- | TTR | saCas9 | saCas9 | CAGGTTTGCAGTCAGATTGGCAGGGAT | 1060 |
| | 12_012 | Promoter | | CBE | | |
| gRNA-#30 | ABE_NGC_20 nt_3- | TTR | spCas9 | spCas9 | CAGTCAGATTGGCAGGGATAAGC | 1061 |
| | 9_008 | Promoter | | NGC ABE | | |
| gRNA-#30 | CBE_NGC_20 nt_4- | TTR | spCas9 | spCas9 | CAGTCAGATTGGCAGGGATAAGC | 1062 |
| | 9_009 | Promoter | | NGC_CBE | | |
| gRNA-#30 | ABE_NGC_20 nt_3- | TTR | spCas9 | spCas9 | CAGTCAGATTGGCAGGGATAAGC | 1063 |
| | 12_020 | Promoter | | NGC IBE | | |
| gRNA-#31 | ABE_NGC_20 nt_3- | TTR | spCas9 | spCas9 | CCACTCATTCTTGGCAGGATGGC | 1064 |
| | 9_008 | Promoter | | NGC ABE | | |
| gRNA-#31 | CBE_NGC_20 nt_4- | TTR | spCas9 | spCas9 | CCACTCATTCTTGGCAGGATGGC | 1065 |
| | 9_009 | Promoter | | NGC CBE | | |
| gRNA-#31 | ABE_NGC_20 nt_3- | TTR | spCas9 | spCas9 | CCACTCATTCTTGGCAGGATGGC | 1066 |
| | 12_020 | Promoter | | NGC IBE | | |
| gRNA-#32 | ABE_NGC_20 nt_3- | TTR | spCas9 | spCas9 | CTAAGTCAATAATCAGAATCAGC | 1067 |
| | 9_008 | Promoter | | NGC ABE | | |
| gRNA-#32 | CBE_NGC_20 nt_4- | TTR | spCas9 | spCas9 | CTAAGTCAATAATCAGAATCAGC | 1068 |
| | 9_009 | Promoter | | NGC CBE | | |
| gRNA-#32 | ABE_NGC_20 nt_3- | TTR | spCas9 | spCas9 | CTAAGTCAATAATCAGAATCAGC | 1069 |
| | 12_020 | Promoter | | NGC IBE | | |
| gRNA-#33 | ABE_VTTN_22 nt_5- | TTR | cas12b | cas12b | CTTAGTCAACAAAGAGAGAATAAGTA | 1070 |
| | 9_017 | Promoter | | ABE | | |
| gRNA-#34 | ABE_NGC_20 nt_3- | TTR | spCas9 | spCas9 | CTTATCCCTGCCAATCTGACTGC | 1071 |
| | 9_008 | Promoter | | NGC ABE | | |
| gRNA-#34 | CBE_NGC_20 nt_4- | TTR | spCas9 | spCas9 | CTTATCCCTGCCAATCTGACTGC | 1072 |
| | 9_009 | Promoter | | NGC CBE | | |
| gRNA-#34 | ABE_NGC_20 nt_3- | TTR | spCas9 | spCas9 | CTTATCCCTGCCAATCTGACTGC | 1073 |
| | 12_020 | Promoter | | NGC IBE | | |
| gRNA-#35 | ABE_VTTN_22 nt_5- | TTR | cas12b | cas12b | CTTATCCCTGCCAATCTGACTGCAAA | 1074 |
| | 9_017 | Promoter | | ABE | | |
| gRNA-#36 | ABE_VTTN_22 nt_5- | TTR | cas12b | cas12b | CTTATTCTCTCTTTGTTGACTAAGTC | 1075 |
| | 9_017 | Promoter | | ABE | | |
| gRNA-#37 | ABE_VTTN_22 nt_5- | TTR | cas12b | cas12b | CTTCTCCTGAGCTAGGCTGCTTATCC | 1076 |
| | 9_017 | Promoter | | ABE | | |
| gRNA-#38 | ABE_NGC_20 nt_3- | TTR | spCas9 | spCas9 | CTTCTGTGATGGCTGCTCCCAGC | 1077 |
| | 9_008 | Promoter | | NGC ABE | | |
| gRNA-#38 | CBE_NGC_20 nt_4- | TTR | spCas9 | spCas9 | CTTCTGTGATGGCTGCTCCCAGC | 1078 |
| | 9_009 | Promoter | | NGC CBE | | |
| gRNA-#38 | ABE_NGC_20 nt_3- | TTR | spCas9 | spCas9 | CTTCTGTGATGGCTGCTCCCAGC | 1079 |
| | 12_020 | Promoter | | NGC IBE | | |
| gRNA-#39 | ABE_VTTN_22 nt_5- | TTR | cas12b | cas12b | CTTCTGTGATGGCTGCTCCCAGCCTG | 1080 |
| | 9_017 | Promoter | | ABE | | |
| gRNA-#40 | ABE_VTTN_22 nt_5- | TTR | cas12b | cas12b | CTTGGCAGGATGGCTTCTCATCGTCT | 1081 |
| | 9_017 | Promoter | | ABE | | |
| gRNA-#41 | ABE_VTTN_22 nt_5- | TTR | cas12b | cas12b | CTTGTCTAGAGAGATTAGAGCATCGG | 1082 |
| | 9_017 | Promoter | | ABE | | |
| gRNA-#42 | ABE_VTTN_22 nt_5- | TTR | cas12b | cas12b | CTTTGTTGACTAAGTCAATAATCAGA | 1083 |
| | 9_017 | Promoter | | ABE | | |
| gRNA-#43 | ABE_VTTN_22 nt_5- | TTR | cas12b | cas12b | CTTTTATACTCACTTCTCCTGAGCTA | 1084 |
| | 9_017 | Promoter | | ABE | | |
| gRNA-#44 | ABE_NGG_20 nt_3- | TTR | spCas9 | spCas9 | GAAGTGAGTATAAAAGCCCCAGG | 1085 |
| | 9_002 | Promoter | | ABE | | |
| gRNA-#44 | CBE_NGG_20 nt_4- | TTR | spCas9 | spCas9 | GAAGTGAGTATAAAAGCCCCAGG | 1086 |
| | 9_003 | Promoter | | CBE | | |
| gRNA-#44 | ABE_NGG_20 nt_3- | TTR | spCas9 | spCas9 IBE | GAAGTGAGTATAAAAGCCCCAGG | 1087 |
| | 12_018 | Promoter | | | | |
| gRNA-#45 | ABE_NGG_20 nt_3- | TTR | spCas9 | spCas9 | GACAAGGTTCATATTTGTATGGG | 1088 |
| | 9_002 | Promoter | | ABE | | |
| gRNA-#45 | CBE_NGG_20 nt_4- | TTR | spCas9 | spCas9 | GACAAGGTTCATATTTGTATGGG | 1089 |
| | 9_003 | Promoter | | CBE | | |
| gRNA-#45 | ABE_NGG_20 nt_3- | TTR | spCas9 | spCas9 IBE | GACAAGGTTCATATTTGTATGGG | 1090 |
| | 12_018 | Promoter | | | | |
| gRNA-#46 | ABE_NGG_20 nt_3- | TTR | spCas9 | spCas9 | GAGTATAAAAGCCCCAGGCTGGG | 1091 |
| | 9_002 | Promoter | | ABE | | |
| gRNA-#46 | CBE_NGG_20 nt_4- | TTR | spCas9 | spCas9 | GAGTATAAAAGCCCCAGGCTGGG | 1092 |
| | 9_003 | Promoter | | CBE | | |
| gRNA-#46 | ABE_NGG_20 nt_3- | TTR | spCas9 | spCas9 IBE | GAGTATAAAAGCCCCAGGCTGGG | 1093 |
| | 12_018 | Promoter | | | | |
| gRNA-#47 | ABE_NGC_20 nt_3- | TTR | spCas9 | spCas9 | GAGTGGACTTCTGTGATGGCTGC | 1094 |
| | 9_008 | Promoter | | NGC ABE | | |
| gRNA-#47 | CBE_NGC_20 nt_4- | TTR | spCas9 | spCas9 | GAGTGGACTTCTGTGATGGCTGC | 1095 |
| | 9_009 | Promoter | | NGC CBE | | |
| gRNA-#47 | ABE_NGC_20 nt_3- | TTR | spCas9 | spCas9 | GAGTGGACTTCTGTGATGGCTGC | 1096 |
| | 12_020 | Promoter | | NGC IBE | | |
| gRNA-#48 | ABE_NGC_20 nt_3- | TTR | spCas9 | spCas9 | GATGGCTGCTCCCAGCCTGGGGC | 1097 |
| | 9_008 | Promoter | | NGC ABE | | |
| gRNA-#48 | CBE_NGC_20 nt_4- | TTR | spCas9 | spCas9 | GATGGCTGCTCCCAGCCTGGGGC | 1098 |
| | 9_009 | Promoter | | NGC CBE | | |
| gRNA-#48 | ABE_NGC_20 nt_3- | TTR | spCas9 | spCas9 | GATGGCTGCTCCCAGCCTGGGGC | 1099 |
| | 12_020 | Promoter | | NGC IBE | | |
| gRNA-#48 | CBE_NGA_20 nt_4- | TTR | spCas9 | spCas9 | GCAGCCTAGCTCAGGAGAAGTGA | 1100 |
| | 9_006 | Promoter | | VRQR | | |
| | | | | CBE | | |
| gRNA-#48 | ABE_NGA_20 nt_3- | TTR | spCas9 | spCas9 | GCAGCCTAGCTCAGGAGAAGTGA | 1101 |
| | 9_005 | Promoter | | VRQR | | |
| | | | | ABE | | |
| gRNA-#48 | ABE_NGA_20 nt_3- | TTR | spCas9 | spCas9 | GCAGCCTAGCTCAGGAGAAGTGA | 1102 |
| | 12_019 | Promoter | | VRQR IBE | | |
| gRNA-#50 | CBE_NGA_20 nt_4- | TTR | spCas9 | spCas9 | GCTGCTTATCCCTGCCAATCTGA | 1103 |
| | 9_006 | Promoter | | VRQR | | |
| | | | | CBE | | |
| gRNA-#50 | ABE_NGA_20 nt_3- | TTR | spCas9 | spCas9 | GCTGCTTATCCCTGCCAATCTGA | 1104 |
| | 9_005 | Promoter | | VRQR | | |
| | | | | ABE | | |
| gRNA-#50 | ABE_NGA_20 nt_3- | TTR | spCas9 | spCas9 | GCTGCTTATCCCTGCCAATCTGA | 1105 |
| | 12_019 | Promoter | | VRQR IBE | | |
| gRNA-#51 | CBE_NGA_20 nt_4- | TTR | spCas9 | spCas9 | GGGATAAGCAGCCTAGCTCAGGA | 1106 |
| | 9_006 | Promoter | | VRQR | | |
| | | | | CBE | | |
| gRNA-#51 | ABE_NGA_20 nt_3- | TTR | spCas9 | spCas9 | GGGATAAGCAGCCTAGCTCAGGA | 1107 |
| | 9_005 | Promoter | | VRQR | | |
| | | | | ABE | | |
| gRNA-#51 | ABE_NGA_20 nt_3- | TTR | spCas9 | spCas9 | GGGATAAGCAGCCTAGCTCAGGA | 1108 |
| | 12_019 | Promoter | | VRQR IBE | | |
| gRNA-#52 | ABE_NGG_20 nt_3- | TTR | spCas9 | spCas9 | GGTTTGCAGTCAGATTGGCAGGG | 1109 |
| | 9_002 | Promoter | | ABE | | |
| gRNA-#52 | CBE_NGG_20 nt_4- | TTR | spCas9 | spCas9 | GGTTTGCAGTCAGATTGGCAGGG | 1110 |
| | 9_003 | Promoter | | CBE | | |
| gRNA-#52 | ABE_NGG_20 nt_3- | TTR | spCas9 | spCas9 IBE | GGTTTGCAGTCAGATTGGCAGGG | 1111 |
| | 12_018 | Promoter | | | | |
| gRNA-#53 | CBE_NGA_20 nt_4- | TTR | spCas9 | spCas9 | GTTACTTATTCTCTCTTTGTTGA | 1112 |
| | 9_006 | Promoter | | VRQR | | |
| | | | | CBE | | |
| gRNA-#53 | ABE_NGA_20 nt_3- | TTR | spCas9 | spCas9 | GTTACTTATTCTCTCTTTGTTGA | 1113 |
| | 9_005 | Promoter | | VRQR | | |
| | | | | ABE | | |
| gRNA-#53 | ABE_NGA_20 nt_3- | TTR | spCas9 | spCas9 | GTTACTTATTCTCTCTTTGTTGA | 1114 |
| | 12_019 | Promoter | | VRQR IBE | | |
| gRNA-#54 | ABE_VTTN_22 nt_5- | TTR | cas12b | cas12b | GTTACTTATTCTCTCTTTGTTGACTA | 1115 |
| | 9_017 | Promoter | | ABE | | |
| gRNA-#55 | ABE_VTTN_22 nt_5- | TTR | cas12b | cas12b | GTTCATATTTGTATGGGTTACTTATT | 1116 |
| | 9_017 | Promoter | | ABE | | |
| gRNA-#56 | ABE_VTTN_22 nt_5- | TTR | cas12b | cas12b | GTTGACTAAGTCAATAATCAGAATCA | 1117 |
| | 9_017 | Promoter | | ABE | | |
| gRNA-#57 | CBE_NGA_20 nt_4- | TTR | spCas9 | spCas9 | GTTTGCAGTCAGATTGGCAGGGA | 1118 |
| | 9_006 | Promoter | | VRQR | | |
| | | | | CBE | | |
| gRNA-#57 | ABE_NGA_20 nt_3- | TTR | spCas9 | spCas9 | GTTTGCAGTCAGATTGGCAGGGA | 1119 |
| | 9_005 | Promoter | | VRQR | | |
| | | | | ABE | | |
| gRNA-#57 | ABE_NGA_20 nt_3- | TTR | spCas9 | spCas9 | GTTTGCAGTCAGATTGGCAGGGA | 1120 |
| | 12_019 | Promoter | | VRQR IBE | | |
| gRNA-#58 | ABE_VTTN_22 nt_5- | TTR | cas12b | cas12b | GTTTGCAGTCAGATTGGCAGGGATAA | 1121 |
| | 9_017 | Promoter | | ABE | | |
| gRNA-#59 | CBE_NGA_20 nt_4- | TTR | spCas9 | spCas9 | TACAAATATGAACCTTGTCTAGA | 1122 |
| | 9_006 | Promoter | | VRQR | | |
| | | | | CBE | | |
| gRNA-#59 | ABE_NGA_20 nt_3- | TTR | spCas9 | spCas9 | TACAAATATGAACCTTGTCTAGA | 1123 |
| | 9_005 | Promoter | | VRQR | | |
| | | | | ABE | | |
| gRNA-#59 | ABE_NGA_20 nt_3- | TTR | spCas9 | spCas9 | TACAAATATGAACCTTGTCTAGA | 1124 |
| | 12_019 | Promoter | | VRQR IBE | | |
| gRNA-#60 | ABE_NGC_20 nt_3- | TTR | spCas9 | spCas9 | TACTCACTTCTCCTGAGCTAGGC | 1125 |
| | 9_008 | Promoter | | NGC ABE | | |
| gRNA-#60 | CBE_NGC_20 nt_4- | TTR | spCas9 | spCas9 | TACTCACTTCTCCTGAGCTAGGC | 1126 |
| | 9_009 | Promoter | | NGC CBE | | |
| gRNA-#60 | ABE_NGC_20 nt_3- | TTR | spCas9 | spCas9 | TACTCACTTCTCCTGAGCTAGGC | 1127 |
| | 12_020 | Promoter | | NGC IBE | | |
| gRNA-#61 | ABE_NGC_20 nt_3- | TTR | spCas9 | spCas9 | TATAAAAGCCCCAGGCTGGGAGC | 1128 |
| | 9_008 | Promoter | | NGC ABE | | |
| gRNA-#61 | CBE_NGC_20 nt_4- | TTR | spCas9 | spCas9 | TATAAAAGCCCCAGGCTGGGAGC | 1129 |
| | 9_009 | Promoter | | NGC CBE | | |
| gRNA-#61 | ABE_NGC_20 nt_3- | TTR | spCas9 | spCas9 | TATAAAAGCCCCAGGCTGGGAGC | 1130 |
| | 12_020 | Promoter | | NGC IBE | | |
| gRNA-#62 | ABE_NGC_20 nt_3- | TTR | spCas9 | spCas9 | TCACTTCTCCTGAGCTAGGCTGC | 1131 |
| | 9_008 | Promoter | | NGC ABE | | |
| gRNA-#62 | CBE_NGC_20 nt_4- | TTR | spCas9 | spCas9 | TCACTTCTCCTGAGCTAGGCTGC | 1132 |
| | 9_009 | Promoter | | NGC CBE | | |
| gRNA-#62 | ABE_NGC_20 nt_3- | TTR | spCas9 | spCas9 | TCACTTCTCCTGAGCTAGGCTGC | 1133 |
| | 12_020 | Promoter | | NGC IBE | | |
| gRNA-#63 | ABE_NGC_20 nt_3- | TTR | spCas9 | spCas9 | TCAGATTGGCAGGGATAAGCAGC | 1134 |
| | 9_008 | Promoter | | NGC ABE | | |
| gRNA-#63 | CBE_NGC_20 nt_4- | TTR | spCas9 | spCas9 | TCAGATTGGCAGGGATAAGCAGC | 1135 |
| | 9_009 | Promoter | | NGC CBE | | |
| gRNA-#63 | ABE_NGC_20 nt_3- | TTR | spCas9 | spCas9 | TCAGATTGGCAGGGATAAGCAGC | 1136 |
| | 12_020 | Promoter | | NGC IBE | | |
| gRNA-#64 | ABE_NGC_20 nt_3- | TTR | spCas9 | spCas9 | TCAGGAGAAGTGAGTATAAAAGC | 1137 |
| | 9_008 | Promoter | | NGC ABE | | |
| gRNA-#64 | CBE_NGC_20 nt_4- | TTR | spCas9 | spCas9 | TCAGGAGAAGTGAGTATAAAAGC | 1138 |
| | 9_009 | Promoter | | NGC CBE | | |
| gRNA-#64 | ABE_NGC_20 nt_3- | TTR | spCas9 | spCas9 | TCAGGAGAAGTGAGTATAAAAGC | 1139 |
| | 12_020 | Promoter | | NGC IBE | | |
| gRNA-#65 | ABE_NNRRT_21 nt_5- | TTR | saCas9 | saCas9 | TCTGACTGCAAACCTGCTGATTCTGAT | 1140 |
| | 14_014 | Promoter | | KKH ABE | | |
| gRNA-#65 | CBE_NNRRT_21 nt_3- | TTR | saCas9 | saCas9 | TCTGACTGCAAACCTGCTGATTCTGAT | 1141 |
| | 12_015 | Promoter | | KKH CBE | | |
| gRNA-#66 | ABE_NGC_20 nt_3- | TTR | spCas9 | spCas9 | TGAGCTAGGCTGCTTATCCCTGC | 1142 |
| | 9_008 | Promoter | | NGC ABE | | |
| gRNA-#66 | CBE_NGC_20 nt_4- | TTR | spCas9 | spCas9 | TGAGCTAGGCTGCTTATCCCTGC | 1143 |
| | 9_009 | Promoter | | NGC CBE | | |
| gRNA-#66 | ABE_NGC_20 nt_3- | TTR | spCas9 | spCas9 | TGAGCTAGGCTGCTTATCCCTGC | 1144 |
| | 12_020 | Promoter | | NGC IBE | | |
| gRNA-#67 | ABE_NGC_20 nt_3- | TTR | spCas9 | spCas9 | TGCCAATCTGACTGCAAACCTGC | 1145 |
| | 9_008 | Promoter | | NGC ABE | | |
| gRNA-#67 | CBE_NGC_20 nt_4- | TTR | spCas9 | spCas9 | TGCCAATCTGACTGCAAACCTGC | 1146 |
| | 9_009 | Promoter | | NGC CBE | | |
| gRNA-#67 | ABE_NGC_20 nt_3- | TTR | spCas9 | spCas9 | TGCCAATCTGACTGCAAACCTGC | 1147 |
| | 12_020 | Promoter | | NGC IBE | | |
| gRNA-#68 | ABE_NGG_20 nt_3- | TTR | spCas9 | spCas9 | TGCTCTAATCTCTCTAGACAAGG | 1148 |
| | 9_002 | Promoter | | ABE | | |
| gRNA-#68 | CBE_NGG_20 nt_4- | TTR | spCas9 | spCas9 | TGCTCTAATCTCTCTAGACAAGG | 1149 |
| | 9_003 | Promoter | | CBE | | |
| gRNA-#68 | ABE_NGG_20 nt_3- | TTR | spCas9 | spCas9 IBE | TGCTCTAATCTCTCTAGACAAGG | 1150 |
| | 12_018 | Promoter | | | | |
| gRNA-#69 | ABE_NGG_20 nt_3- | TTR | spCas9 | spCas9 | TGTGATGGCTGCTCCCAGCCTGG | 1151 |
| | 9_002 | Promoter | | ABE | | |
| gRNA-#69 | CBE_NGG_20 nt_4- | TTR | spCas9 | spCas9 | TGTGATGGCTGCTCCCAGCCTGG | 1152 |
| | 9_003 | Promoter | | CBE | | |
| gRNA-#69 | ABE_NGG_20 nt_3- | TTR | spCas9 | spCas9 IBE | TGTGATGGCTGCTCCCAGCCTGG | 1153 |
| | 12_018 | Promoter | | | | |
| gRNA-#70 | ABE_NGC_20 nt_3- | TTR | spCas9 | spCas9 | TTGGCAGGGATAAGCAGCCTAGC | 1154 |
| | 9_008 | Promoter | | NGC ABE | | |
| gRNA-#70 | CBE_NGC_20 nt_4- | TTR | spCas9 | spCas9 | TTGGCAGGGATAAGCAGCCTAGC | 1155 |
| | 9_009 | Promoter | | NGC CBE | | |
| gRNA-#70 | ABE_NGC_20 nt_3- | TTR | spCas9 | spCas9 | TTGGCAGGGATAAGCAGCCTAGC | 1156 |
| | 12_020 | Promoter | | NGC IBE | | |
| gRNA-#71 | ABE_NGC_20 nt_3- | TTR | spCas9 | spCas9 | TTTTATACTCACTTCTCCTGAGC | 1157 |
| | 9_008 | Promoter | | NGC ABE | | |
| gRNA-#71 | CBE_NGC_20 nt_4- | TTR | spCas9 | spCas9 | TTTTATACTCACTTCTCCTGAGC | 1158 |
| | 9_009 | Promoter | | NGC CBE | | |
| gRNA-#71 | ABE_NGC_20 nt_3- | TTR | spCas9 | spCas9 | TTTTATACTCACTTCTCCTGAGC | 1159 |
| | 12_020 | Promoter | | NGC IBE | | |
| | | Human | | | | Target |
| gRNA | | Chromosome | Start | | | Base |
| Name | PAM | Location | Site | End Site | Strand | Position(s) |
| gRNA1594 | GGC | chr18 | 31593011 | 31593034 | − | 8 |
| gRNA1594 | GGC | chr18 | 31593011 | 31593034 | − | 7 |
| gRNA1594 | GGC | chr18 | 31593011 | 31593034 | − | 7 |
| gRNA1595 | AGC | chr18 | 31592994 | 31593017 | − | 9 |
| gRNA1596 | AGC | chr18 | 31592991 | 31593014 | − | 7, 6 |
| gRNA1597 | AGC | chr18 | 31598558 | 31598581 | + | 8 |
| gRNA1597 | AGC | chr18 | 31598558 | 31598581 | + | 8 |
| gRNA1598 | TGG | chr18 | 31595114 | 31595137 | + | 4 |
| gRNA1599 | TGG | chr18 | 31595239 | 31595262 | − | 6 |
| gRNA1600 | TGG | chr18 | 31593012 | 31593035 | − | 8 |
| gRNA1601 | TGC | chr18 | 31595245 | 31595268 | − | 12 |
| gRNA1602 | AGC | chr18 | 31591959 | 31591982 | − | 10 |
| gRNA1603 | TGA | chr18 | 31592883 | 31592906 | + | 11 |
| gRNA1604 | TGA | chr18 | 31595108 | 31595131 | + | 10 |
| gRNA1605 | GGA | chr18 | 31595115 | 31595138 | + | 3 |
| gRNA1606 | GGA | chr18 | 31595238 | 31595261 | − | 5 |
| gRNA1607 | AGA | chr18 | 31591953 | 31591976 | − | 4 |
| gRNA1746 | TGA | chr18 | 31591776 | 31591799 | − | |
| gRNA1746 | TGA | chr18 | 31591776 | 31591799 | − | |
| gRNA1746 | TGA | chr18 | 31591776 | 31591799 | − | |
| gRNA1747 | ACAAAT | chr18 | 31591738 | 31591765 | − | |
| gRNA1747 | ACAAAT | chr18 | 31591738 | 31591765 | − | |
| gRNA1748 | GTGAGT | chr18 | 31591820 | 31591847 | + | |
| gRNA1748 | GTGAGT | chr18 | 31591820 | 31591847 | + | |
| gRNA1749 | GGA | chr18 | 31591880 | 31591903 | + | |
| gRNA1749 | GGA | chr18 | 31591880 | 31591903 | + | |
| gRNA1749 | GGA | chr18 | 31591880 | 31591903 | + | |
| gRNA1750 | AAGAAT | chr18 | 31591890 | 31591917 | − | |
| gRNA1750 | AAGAAT | chr18 | 31591890 | 31591917 | − | |
| gRNA1751 | TGG | chr18 | 31591725 | 31591748 | + | |
| gRNA1751 | TGG | chr18 | 31591725 | 31591748 | + | |
| gRNA1751 | TGG | chr18 | 31591725 | 31591748 | + | |
| gRNA1752 | AGA | chr18 | 31591858 | 31591881 | + | |
| gRNA1752 | AGA | chr18 | 31591858 | 31591881 | + | |
| gRNA1752 | AGA | chr18 | 31591858 | 31591881 | + | |
| gRNA1753 | TGA | chr18 | 31591734 | 31591757 | − | |
| gRNA1753 | TGA | chr18 | 31591734 | 31591757 | − | |
| gRNA1753 | TGA | chr18 | 31591734 | 31591757 | − | |
| gRNA1754 | AGG | chr18 | 31591826 | 31591849 | − | |
| gRNA1754 | AGG | chr18 | 31591826 | 31591849 | − | |
| gRNA1754 | AGG | chr18 | 31591826 | 31591849 | − | |
| gRNA1755 | AGA | chr18 | 31591761 | 31591784 | − | |
| gRNA1755 | AGA | chr18 | 31591761 | 31591784 | − | |
| gRNA1755 | AGA | chr18 | 31591761 | 31591784 | − | |
| gRNA1756 | AGA | chr18 | 31591720 | 31591743 | − | |
| gRNA1756 | AGA | chr18 | 31591720 | 31591743 | − | |
| gRNA1756 | AGA | chr18 | 31591720 | 31591743 | − | |
| gRNA1757 | CAGGAT | chr18 | 31591877 | 31591904 | + | |
| gRNA1757 | CAGGAT | chr18 | 31591877 | 31591904 | + | |
| gRNA1758 | AGAAGT | chr18 | 31591857 | 31591884 | + | |
| gRNA1758 | AGAAGT | chr18 | 31591857 | 31591884 | + | |
| gRNA1759 | GGA | chr18 | 31591883 | 31591906 | − | |
| gRNA1759 | GGA | chr18 | 31591883 | 31591906 | − | |
| gRNA1759 | GGA | chr18 | 31591883 | 31591906 | − | |
| gRNA1760 | CTTAGT | chr18 | 31591770 | 31591797 | − | |
| gRNA1760 | CTTAGT | chr18 | 31591770 | 31591797 | − | |
| gRNA1761 | CAAGGT | chr18 | 31591707 | 31591734 | + | |
| gRNA1761 | CAAGGT | chr18 | 31591707 | 31591734 | + | |
| gRNA1762 | GCAGGT | chr18 | 31591771 | 31591798 | + | |
| gRNA1762 | GCAGGT | chr18 | 31591771 | 31591798 | + | |
| gRNA1763 | ATGGGT | chr18 | 31591723 | 31591750 | + | |
| gRNA1763 | ATGGGT | chr18 | 31591723 | 31591750 | + | |
| gRNA1764 | AGA | chr18 | 31591713 | 31591736 | − | |
| gRNA1764 | AGA | chr18 | 31591713 | 31591736 | − | |
| gRNA1764 | AGA | chr18 | 31591713 | 31591736 | − | |
| gRNA1765 | AGG | chr18 | 31591879 | 31591902 | + | |
| gRNA1765 | AGG | chr18 | 31591879 | 31591902 | + | |
| gRNA1765 | AGG | chr18 | 31591879 | 31591902 | + | |
| gRNA1766 | AGA | chr18 | 31591786 | 31591809 | + | |
| gRNA1766 | AGA | chr18 | 31591786 | 31591809 | + | |
| gRNA1766 | AGA | chr18 | 31591786 | 31591809 | + | |
| gRNA1767 | TGG | chr18 | 31591871 | 31591894 | − | |
| gRNA1767 | TGG | chr18 | 31591871 | 31591894 | − | |
| gRNA1767 | TGG | chr18 | 31591871 | 31591894 | − | |
| gRNA1768 | TGA | chr18 | 31591783 | 31591806 | − | |
| gRNA1768 | TGA | chr18 | 31591783 | 31591806 | − | |
| gRNA1768 | TGA | chr18 | 31591783 | 31591806 | − | |
| gRNA1769 | ATAAGT | chr18 | 31591751 | 31591778 | − | |
| gRNA1769 | ATAAGT | chr18 | 31591751 | 31591778 | − | |
| gRNA1770 | AGA | chr18 | 31591817 | 31591840 | + | |
| gRNA1770 | AGA | chr18 | 31591817 | 31591840 | + | |
| gRNA1770 | AGA | chr18 | 31591817 | 31591840 | + | |
| gRNA1771 | AGA | chr18 | 31591892 | 31591915 | − | |
| gRNA1771 | AGA | chr18 | 31591892 | 31591915 | − | |
| gRNA1771 | AGA | chr18 | 31591892 | 31591915 | − | |
| gRNA1772 | TGG | chr18 | 31591884 | 31591907 | − | |
| gRNA1772 | TGG | chr18 | 31591884 | 31591907 | − | |
| gRNA1772 | TGG | chr18 | 31591884 | 31591907 | − | |
| gRNA1773 | TGA | chr18 | 31591832 | 31591855 | − | |
| gRNA1773 | TGA | chr18 | 31591832 | 31591855 | − | |
| gRNA1773 | TGA | chr18 | 31591832 | 31591855 | − | |
| gRNA1774 | AGAAGT | chr18 | 31591816 | 31591843 | + | |
| gRNA1774 | AGAAGT | chr18 | 31591816 | 31591843 | + | |
| gRNA1775 | CGG | chr18 | 31591706 | 31591729 | − | |
| gRNA1775 | CGG | chr18 | 31591706 | 31591729 | − | |
| gRNA1775 | CGG | chr18 | 31591706 | 31591729 | − | |
| gRNA1776 | GGG | chr18 | 31591855 | 31591878 | − | |
| gRNA1776 | GGG | chr18 | 31591855 | 31591878 | − | |
| gRNA1776 | GGG | chr18 | 31591855 | 31591878 | − | |
| gRNA1777 | CTAAGT | chr18 | 31591750 | 31591777 | + | |
| gRNA1777 | CTAAGT | chr18 | 31591750 | 31591777 | + | |
| gRNA1778 | GTCAAT | chr18 | 31591754 | 31591781 | + | |
| gRNA1778 | GTCAAT | chr18 | 31591754 | 31591781 | + | |
| gRNA1779 | AGA | chr18 | 31591759 | 31591782 | − | |
| gRNA1779 | AGA | chr18 | 31591759 | 31591782 | − | |
| gRNA1779 | AGA | chr18 | 31591759 | 31591782 | − | |
| gRNA1780 | GAGAAT | chr18 | 31591755 | 31591782 | − | |
| gRNA1780 | GAGAAT | chr18 | 31591755 | 31591782 | − | |
| gRNA1781 | TCAGAT | chr18 | 31591783 | 31591810 | + | |
| gRNA1781 | TCAGAT | chr18 | 31591783 | 31591810 | + | |
| gRNA1782 | TGG | chr18 | 31591883 | 31591906 | + | |
| gRNA1782 | TGG | chr18 | 31591883 | 31591906 | + | |
| gRNA1782 | TGG | chr18 | 31591883 | 31591906 | + | |
| gRNA1783 | AATAAT | chr18 | 31591757 | 31591784 | + | |
| gRNA1783 | AATAAT | chr18 | 31591757 | 31591784 | + | |
| gRNA1784 | ATGAGT | chr18 | 31591886 | 31591913 | − | |
| gRNA1784 | ATGAGT | chr18 | 31591886 | 31591913 | − | |
| gRNA1785 | GCCAAT | chr18 | 31591808 | 31591835 | − | |
| gRNA1785 | GCCAAT | chr18 | 31591808 | 31591835 | − | |
| gRNA1786 | TGG | chr18 | 31591842 | 31591865 | + | |
| gRNA1786 | TGG | chr18 | 31591842 | 31591865 | + | |
| gRNA1786 | TGG | chr18 | 31591842 | 31591865 | + | |
| gRNA1787 | GGG | chr18 | 31591854 | 31591877 | − | |
| gRNA1787 | GGG | chr18 | 31591854 | 31591877 | − | |
| gRNA1787 | GGG | chr18 | 31591854 | 31591877 | − | |
| gRNA1788 | TGTGAT | chr18 | 31591873 | 31591900 | − | |
| gRNA1788 | TGTGAT | chr18 | 31591873 | 31591900 | − | |
| gRNA1789 | GCTGAT | chr18 | 31591788 | 31591815 | − | |
| gRNA1789 | GCTGAT | chr18 | 31591788 | 31591815 | − | |
| gRNA1790 | AGA | chr18 | 31591765 | 31591788 | + | |
| gRNA1790 | AGA | chr18 | 31591765 | 31591788 | + | |
| gRNA1790 | AGA | chr18 | 31591765 | 31591788 | + | |
| gRNA1791 | AGA | chr18 | 31591757 | 31591780 | − | |
| gRNA1791 | AGA | chr18 | 31591757 | 31591780 | − | |
| gRNA1791 | AGA | chr18 | 31591757 | 31591780 | − | |
| gRNA1792 | CAGAAT | chr18 | 31591763 | 31591790 | + | |
| gRNA1792 | CAGAAT | chr18 | 31591763 | 31591790 | + | |
| gRNA-#1 | AGC | chr18 | 31591849 | 31591872 | + | |
| gRNA-#1 | AGC | chr18 | 31591849 | 31591872 | + | |
| gRNA-#1 | AGC | chr18 | 31591849 | 31591872 | + | |
| gRNA-#2 | GGC | chr18 | 31591839 | 31591862 | + | |
| gRNA-#2 | GGC | chr18 | 31591839 | 31591862 | + | |
| gRNA-#2 | GGC | chr18 | 31591839 | 31591862 | + | |
| gRNA-#3 | TGCAGT | chr18 | 31591778 | 31591805 | + | |
| gRNA-#3 | TGCAGT | chr18 | 31591778 | 31591805 | + | |
| gRNA-#4 | AGA | chr18 | 31591718 | 31591741 | − | |
| gRNA-#4 | AGA | chr18 | 31591718 | 31591741 | − | |
| gRNA-#4 | AGA | chr18 | 31591718 | 31591741 | − | |
| gRNA-#5 | GGC | chr18 | 31591870 | 31591893 | − | |
| gRNA-#5 | GGC | chr18 | 31591870 | 31591893 | − | |
| gRNA-#5 | GGC | chr18 | 31591870 | 31591893 | − | |
| gRNA-#6 | AGAGAT | chr18 | 31591717 | 31591744 | − | |
| gRNA-#6 | AGAGAT | chr18 | 31591717 | 31591744 | − | |
| gRNA-#7 | GGC | chr18 | 31591876 | 31591899 | + | |
| gRNA-#7 | GGC | chr18 | 31591876 | 31591899 | + | |
| gRNA-#7 | GGC | chr18 | 31591876 | 31591899 | + | |
| gRNA-#8 | AGC | chr18 | 31591711 | 31591734 | − | |
| gRNA-#8 | AGC | chr18 | 31591711 | 31591734 | − | |
| gRNA-#8 | AGC | chr18 | 31591711 | 31591734 | − | |
| gRNA-#9 | TGA | chr18 | 31591888 | 31591911 | − | |
| gRNA-#9 | TGA | chr18 | 31591888 | 31591911 | − | |
| gRNA-#9 | TGA | chr18 | 31591888 | 31591911 | − | |
| gRNA-#10 | GGC | chr18 | 31591791 | 31591814 | + | |
| gRNA-#10 | GGC | chr18 | 31591791 | 31591814 | + | |
| gRNA-#10 | GGC | chr18 | 31591791 | 31591814 | + | |
| gRNA-#11 | AGG | chr18 | 31591814 | 31591837 | + | |
| gRNA-#11 | AGG | chr18 | 31591814 | 31591837 | + | |
| gRNA-#11 | AGG | chr18 | 31591814 | 31591837 | + | |
| gRNA-#12 | AGG | chr18 | 31591794 | 31591817 | + | |
| gRNA-#12 | AGG | chr18 | 31591794 | 31591817 | + | |
| gRNA-#12 | AGG | chr18 | 31591794 | 31591817 | + | |
| gRNA-#13 | GGA | chr18 | 31591844 | 31591867 | + | |
| gRNA-#13 | GGA | chr18 | 31591844 | 31591867 | + | |
| gRNA-#13 | GGA | chr18 | 31591844 | 31591867 | + | |
| gRNA-#14 | AGG | chr18 | 31591774 | 31591797 | + | |
| gRNA-#14 | AGG | chr18 | 31591774 | 31591797 | + | |
| gRNA-#14 | AGG | chr18 | 31591774 | 31591797 | + | |
| gRNA-#15 | TGC | chr18 | 31591779 | 31591802 | + | |
| gRNA-#15 | TGC | chr18 | 31591779 | 31591802 | + | |
| gRNA-#15 | TGC | chr18 | 31591779 | 31591802 | + | |
| gRNA-#16 | ATTA | chr18 | 31591758 | 31591784 | − | |
| gRNA-#17 | ATTC | chr18 | 31591755 | 31591781 | + | |
| gRNA-#18 | ATTC | chr18 | 31591764 | 31591790 | − | |
| gRNA-#19 | ATTC | chr18 | 31591890 | 31591916 | + | |
| gRNA-#20 | ATTG | chr18 | 31591755 | 31591781 | − | |
| gRNA-#21 | ATTG | chr18 | 31591808 | 31591834 | + | |
| gRNA-#22 | ATTT | chr18 | 31591738 | 31591764 | + | |
| gRNA-#23 | TGA | chr18 | 31591874 | 31591897 | − | |
| gRNA-#23 | TGA | chr18 | 31591874 | 31591897 | − | |
| gRNA-#23 | TGA | chr18 | 31591874 | 31591897 | − | |
| gRNA-#24 | TGA | chr18 | 31591789 | 31591812 | − | |
| gRNA-#24 | TGA | chr18 | 31591789 | 31591812 | − | |
| gRNA-#24 | TGA | chr18 | 31591789 | 31591812 | − | |
| gRNA-#25 | TGG | chr18 | 31591875 | 31591898 | + | |
| gRNA-#25 | TGG | chr18 | 31591875 | 31591898 | + | |
| gRNA-#25 | TGG | chr18 | 31591875 | 31591898 | + | |
| gRNA-#26 | TGC | chr18 | 31591897 | 31591920 | − | |
| gRNA-#26 | TGC | chr18 | 31591897 | 31591920 | − | |
| gRNA-#26 | TGC | chr18 | 31591897 | 31591920 | − | |
| gRNA-#27 | TGG | chr18 | 31591790 | 31591813 | + | |
| gRNA-#27 | TGG | chr18 | 31591790 | 31591813 | + | |
| gRNA-#27 | TGG | chr18 | 31591790 | 31591813 | + | |
| gRNA-#28 | TGC | chr18 | 31591898 | 31591921 | + | |
| gRNA-#28 | TGC | chr18 | 31591898 | 31591921 | + | |
| gRNA-#28 | TGC | chr18 | 31591898 | 31591921 | + | |
| gRNA-#29 | AGGGAT | chr18 | 31591793 | 31591820 | + | |
| gRNA-#29 | AGGGAT | chr18 | 31591793 | 31591820 | + | |
| gRNA-#30 | AGC | chr18 | 31591801 | 31591824 | + | |
| gRNA-#30 | AGC | chr18 | 31591801 | 31591824 | + | |
| gRNA-#30 | AGC | chr18 | 31591801 | 31591824 | + | |
| gRNA-#31 | GGC | chr18 | 31591884 | 31591907 | + | |
| gRNA-#31 | GGC | chr18 | 31591884 | 31591907 | + | |
| gRNA-#31 | GGC | chr18 | 31591884 | 31591907 | + | |
| gRNA-#32 | AGC | chr18 | 31591771 | 31591794 | + | |
| gRNA-#32 | AGC | chr18 | 31591771 | 31591794 | + | |
| gRNA-#32 | AGC | chr18 | 31591771 | 31591794 | + | |
| gRNA-#33 | CTTA | chr18 | 31591750 | 31591776 | − | |
| gRNA-#34 | TGC | chr18 | 31591800 | 31591823 | − | |
| gRNA-#34 | TGC | chr18 | 31591800 | 31591823 | − | |
| gRNA-#34 | TGC | chr18 | 31591800 | 31591823 | − | |
| gRNA-#35 | CTTA | chr18 | 31591797 | 31591823 | − | |
| gRNA-#36 | CTTA | chr18 | 31591752 | 31591778 | + | |
| gRNA-#37 | CTTC | chr18 | 31591816 | 31591842 | − | |
| gRNA-#38 | AGC | chr18 | 31591860 | 31591883 | − | |
| gRNA-#38 | AGC | chr18 | 31591860 | 31591883 | − | |
| gRNA-#38 | AGC | chr18 | 31591860 | 31591883 | − | |
| gRNA-#39 | CTTC | chr18 | 31591857 | 31591883 | − | |
| gRNA-#40 | CTTG | chr18 | 31591893 | 31591919 | + | |
| gRNA-#41 | CTTG | chr18 | 31591706 | 31591732 | − | |
| gRNA-#42 | CTTT | chr18 | 31591762 | 31591788 | + | |
| gRNA-#43 | CTTT | chr18 | 31591828 | 31591854 | − | |
| gRNA-#44 | AGG | chr18 | 31591838 | 31591861 | + | |
| gRNA-#44 | AGG | chr18 | 31591838 | 31591861 | + | |
| gRNA-#44 | AGG | chr18 | 31591838 | 31591861 | + | |
| gRNA-#45 | GGG | chr18 | 31591726 | 31591749 | + | |
| gRNA-#45 | GGG | chr18 | 31591726 | 31591749 | + | |
| gRNA-#45 | GGG | chr18 | 31591726 | 31591749 | + | |
| gRNA-#46 | GGG | chr18 | 31591843 | 31591866 | + | |
| gRNA-#46 | GGG | chr18 | 31591843 | 31591866 | + | |
| gRNA-#46 | GGG | chr18 | 31591843 | 31591866 | + | |
| gRNA-#47 | TGC | chr18 | 31591867 | 31591890 | − | |
| gRNA-#47 | TGC | chr18 | 31591867 | 31591890 | − | |
| gRNA-#47 | TGC | chr18 | 31591867 | 31591890 | − | |
| gRNA-#48 | GGC | chr18 | 31591853 | 31591876 | − | |
| gRNA-#48 | GGC | chr18 | 31591853 | 31591876 | − | |
| gRNA-#48 | GGC | chr18 | 31591853 | 31591876 | − | |
| gRNA-#48 | TGA | chr18 | 31591822 | 31591845 | + | |
| gRNA-#48 | TGA | chr18 | 31591822 | 31591845 | + | |
| gRNA-#48 | TGA | chr18 | 31591822 | 31591845 | + | |
| gRNA-#50 | TGA | chr18 | 31591804 | 31591827 | − | |
| gRNA-#50 | TGA | chr18 | 31591804 | 31591827 | − | |
| gRNA-#50 | TGA | chr18 | 31591804 | 31591827 | − | |
| gRNA-#51 | GGA | chr18 | 31591815 | 31591838 | + | |
| gRNA-#51 | GGA | chr18 | 31591815 | 31591838 | + | |
| gRNA-#51 | GGA | chr18 | 31591815 | 31591838 | + | |
| gRNA-#52 | GGG | chr18 | 31591795 | 31591818 | + | |
| gRNA-#52 | GGG | chr18 | 31591795 | 31591818 | + | |
| gRNA-#52 | GGG | chr18 | 31591795 | 31591818 | + | |
| gRNA-#53 | TGA | chr18 | 31591748 | 31591771 | + | |
| gRNA-#53 | TGA | chr18 | 31591748 | 31591771 | + | |
| gRNA-#53 | TGA | chr18 | 31591748 | 31591771 | + | |
| gRNA-#54 | GTTA | chr18 | 31591748 | 31591774 | + | |
| gRNA-#55 | GTTC | chr18 | 31591732 | 31591758 | + | |
| gRNA-#56 | GTTG | chr18 | 31591766 | 31591792 | + | |
| gRNA-#57 | GGA | chr18 | 31591796 | 31591819 | + | |
| gRNA-#57 | GGA | chr18 | 31591796 | 31591819 | + | |
| gRNA-#57 | GGA | chr18 | 31591796 | 31591819 | + | |
| gRNA-#58 | GTTT | chr18 | 31591796 | 31591822 | + | |
| gRNA-#59 | AGA | chr18 | 31591722 | 31591745 | − | |
| gRNA-#59 | AGA | chr18 | 31591722 | 31591745 | − | |
| gRNA-#59 | AGA | chr18 | 31591722 | 31591745 | − | |
| gRNA-#60 | GGC | chr18 | 31591825 | 31591848 | − | |
| gRNA-#60 | GGC | chr18 | 31591825 | 31591848 | − | |
| gRNA-#60 | GGC | chr18 | 31591825 | 31591848 | − | |
| gRNA-#61 | AGC | chr18 | 31591846 | 31591869 | + | |
| gRNA-#61 | AGC | chr18 | 31591846 | 31591869 | + | |
| gRNA-#61 | AGC | chr18 | 31591846 | 31591869 | + | |
| gRNA-#62 | TGC | chr18 | 31591822 | 31591845 | − | |
| gRNA-#62 | TGC | chr18 | 31591822 | 31591845 | − | |
| gRNA-#62 | TGC | chr18 | 31591822 | 31591845 | − | |
| gRNA-#63 | AGC | chr18 | 31591804 | 31591827 | + | |
| gRNA-#63 | AGC | chr18 | 31591804 | 31591827 | + | |
| gRNA-#63 | AGC | chr18 | 31591804 | 31591827 | + | |
| gRNA-#64 | AGC | chr18 | 31591832 | 31591855 | + | |
| gRNA-#64 | AGC | chr18 | 31591832 | 31591855 | + | |
| gRNA-#64 | AGC | chr18 | 31591832 | 31591855 | + | |
| gRNA-#65 | TCTGAT | chr18 | 31591782 | 31591809 | − | |
| gRNA-#65 | TCTGAT | chr18 | 31591782 | 31591809 | − | |
| gRNA-#66 | TGC | chr18 | 31591812 | 31591835 | − | |
| gRNA-#66 | TGC | chr18 | 31591812 | 31591835 | − | |
| gRNA-#66 | TGC | chr18 | 31591812 | 31591835 | − | |
| gRNA-#67 | TGC | chr18 | 31591792 | 31591815 | − | |
| gRNA-#67 | TGC | chr18 | 31591792 | 31591815 | − | |
| gRNA-#67 | TGC | chr18 | 31591792 | 31591815 | − | |
| gRNA-#68 | AGG | chr18 | 31591710 | 31591733 | + | |
| gRNA-#68 | AGG | chr18 | 31591710 | 31591733 | + | |
| gRNA-#68 | AGG | chr18 | 31591710 | 31591733 | + | |
| gRNA-#69 | TGG | chr18 | 31591856 | 31591879 | − | |
| gRNA-#69 | TGG | chr18 | 31591856 | 31591879 | − | |
| gRNA-#69 | TGG | chr18 | 31591856 | 31591879 | − | |
| gRNA-#70 | AGC | chr18 | 31591809 | 31591832 | + | |
| gRNA-#70 | AGC | chr18 | 31591809 | 31591832 | + | |
| gRNA-#70 | AGC | chr18 | 31591809 | 31591832 | + | |
| gRNA-#71 | AGC | chr18 | 31591830 | 31591853 | − | |
| gRNA-#71 | AGC | chr18 | 31591830 | 31591853 | − | |
| gRNA-#71 | AGC | chr18 | 31591830 | 31591853 | − | |

[0203] The spacer sequences in Table 2A corresponding to sgRNAs sgRNA_361, sgRNA_362, sgRNA_363, sgRNA_364, sgRNA_365, sgRNA_366, and sgRNA_367 can be used for targeting a base editor to alter a nucleobase of a splice site of the transthyretin polynucleotide. The spacer sequences in Table 2A corresponding to sgRNAs sgRNA_368, sgRNA_369, sgRNA_370, sgRNA_371, sgRNA_372, sgRNA_373, and sgRNA_374 can be used for targeting an endonuclease to a transthyretin (TTR) polynucleotide sequence. The three spacer sequences in Table 2 corresponding to sgRNA_375, sgRNA_376, and sgRNA_377 can be used to alter a nucleobase of a transthyretin (TTR) polynucleotide. The alteration of the nucleobase can result in an alteration of an isoleucine (I) to a valine (V) (e.g., to correct a V122I mutation in a transthyretin polypeptide encoded by the transthyretin polynucleotide). In embodiments, a transthyretin polynucleotide can be edited using the following combinations of base editors and sgRNA sequences (see Tables 1 and 2A): ABE8.8 and sgRNA_361; ABE8.8 and sgRNA_362; ABE8.8-VRQR and sgRNA_363; BE4-VRQR and sgRNA_363; BE4-VRQR and sgRNA_364; saABE8.8 and sgRNA_365; saBE4 and sgRNA_365; saBE4-KKH and sgRNA_366, ABE-bhCas12b and sgRNA_367; spCas9-ABE and sgRNA_375; spCas9-VRQR-ABE and sgRNA_376; or saCas9-ABE and sgRNA_377. The PAM sequence of spCas9-ABE can be AGG. The PAM sequence of spCas9-VRQR-ABE can be GGA. The PAM sequence of saCas9-ABE can be AGGAAT.

[0204] In certain embodiments, the fusion proteins provided herein comprise one or more features that improve the base editing activity of the fusion proteins. For example, any of the fusion proteins provided herein may comprise a Cas9 domain that has reduced nuclease activity. In some embodiments, any of the fusion proteins provided herein may have a Cas9 domain that does not have nuclease activity (dCas9), or a Cas9 domain that cuts one strand of a duplexed DNA molecule, referred to as a Cas9 nickase (nCas9). Without wishing to be bound by any particular theory, the presence of the catalytic residue (e.g., H840) maintains the activity of the Cas9 to cleave the non-edited (e.g., non-methylated) strand opposite the targeted nucleobase. Mutation of the catalytic residue (e.g., D10 to A10) prevents cleavage of the edited strand containing the targeted A residue. Such Cas9 variants can generate a single-strand DNA break (nick) at a specific location based on the gRNA-defined target sequence, leading to repair of the non-edited strand, ultimately resulting in a nucleobase change on the non-edited strand.

### Nucleobase Editors

[0205] Useful in the methods and compositions described herein are nucleobase editors that edit, modify or alter a target nucleotide sequence of a polynucleotide. Nucleobase editors described herein typically include a polynucleotide programmable nucleotide binding domain and a nucleobase editing domain (e.g., adenosine deaminase or cytidine deaminase). A polynucleotide programmable nucleotide binding domain, when in conjunction with a bound guide polynucleotide (e.g., gRNA), can specifically bind to a target polynucleotide sequence and thereby localize the base editor to the target nucleic acid sequence desired to be edited.

### Polynucleotide Programmable Nucleotide Binding Domain

[0206] Polynucleotide programmable nucleotide binding domains bind polynucleotides (e.g., RNA, DNA). A polynucleotide programmable nucleotide binding domain of a base editor can itself comprise one or more domains (e.g., one or more nuclease domains). In some embodiments, the nuclease domain of a polynucleotide programmable nucleotide binding domain can comprise an endonuclease or an exonuclease. An endonuclease can cleave a single strand of a double-stranded nucleic acid or both strands of a double-stranded nucleic acid molecule. In some embodiments, a nuclease domain of a polynucleotide programmable nucleotide binding domain can cut zero, one, or two strands of a target polynucleotide.

[0207] Non-limiting examples of a polynucleotide programmable nucleotide binding domain which can be incorporated into a base editor include a CRISPR protein-derived domain, a restriction nuclease, a meganuclease, TAL nuclease (TALEN), and a zinc finger nuclease (ZFN). In some embodiments, a base editor comprises a polynucleotide programmable nucleotide binding domain comprising a natural or modified protein or portion thereof which via a bound guide nucleic acid is capable of binding to a nucleic acid sequence during CRISPR (i.e., Clustered Regularly Interspaced Short Palindromic Repeats)-mediated modification of a nucleic acid. Such a protein is referred to herein as a “CRISPR protein.” Accordingly, disclosed herein is a base editor comprising a polynucleotide programmable nucleotide binding domain comprising all or a portion of a CRISPR protein (i.e. a base editor comprising as a domain all or a portion of a CRISPR protein, also referred to as a “CRISPR protein-derived domain” of the base editor). A CRISPR protein-derived domain incorporated into a base editor can be modified compared to a wild-type or natural version of the CRISPR protein. For example, as described below a CRISPR protein-derived domain can comprise one or more mutations, insertions, deletions, rearrangements and/or recombinations relative to a wild-type or natural version of the CRISPR protein.

[0208] Cas proteins that can be used herein include class 1 and class 2. Non-limiting examples of Cas proteins include Cas1, Cas1B, Cas2, Cas3, Cas4, Cas5, Cas5d, Cas5t, Cas5h, Cas5a, Cas6, Cas7, Cas8, Cas9 (also known as Csn1 or Csx12), Cas10, Csy1, Csy2, Csy3, Csy4, Cse1, Cse2, Cse3, Cse4, Cse5e, Csc1, Csc2, Csa5, Csn1, Csn2, Csm1, Csm2, Csm3, Csm4, Csm5, Csm6, Cmr1, Cmr3, Cmr4, Cmr5, Cmr6, Csb1, Csb2, Csb3, Csx17, Csx14, Csx10, Csx16, CsaX, Csx3, Csx1, Csx1S, Csf1, Csf2, CsO, Csf4, Csd1, Csd2, Cst1, Cst2, Csh1, Csh2, Csa1, Csa2, Csa3, Csa4, Csa5, Cas12a/Cpf1, Cas12b/C2c1 (e.g., SEQ ID NO: 236), Cas12c/C2c3, Cas12d/CasY, Cas12e/CasX, Cas12g, Cas12h, Cas12i, and Cas12j/Cas(D, CARF, DinG, homologues thereof, or modified versions thereof. A CRISPR enzyme can direct cleavage of one or both strands at a target sequence, such as within a target sequence and/or within a complement of a target sequence. For example, a CRISPR enzyme can direct cleavage of one or both strands within about 1, 2, 3, 4, 5, 6, 7, 8, 9, 10, 15, 20, 25, 50, 100, 200, 500, or more base pairs from the first or last nucleotide of a target sequence.

[0209] A vector that encodes a CRISPR enzyme that is mutated to with respect, to a corresponding wild-type enzyme such that the mutated CRISPR enzyme lacks the ability to cleave one or both strands of a target polynucleotide containing a target sequence can be used. A Cas protein (e.g., Cas9, Cas12) or a Cas domain (e.g., Cas9, Cas12) can refer to a polypeptide or domain with at least or at least about 50%, 60%, 70%, 80%, 90%, 91%, 92%, 93%, 94%, 95%, 96%, 97%, 98%, 99%, or 100% sequence identity and/or sequence homology to a wild-type exemplary Cas polypeptide or Cas domain. Cas (e.g., Cas9, Cas12) can refer to the wild-type or a modified form of the Cas protein that can comprise an amino acid change such as a deletion, insertion, substitution, variant, mutation, fusion, chimera, or any combination thereof. In some embodiments, a CRISPR protein-derived domain of a base editor can include all or a portion of Cas9 from Corynebacterium ulcerans (NCBI Refs: NC_015683.1, NC_017317.1); Corynebacterium diphtheria (NCBI Refs: NC_016782.1, NC_016786.1); Spiroplasma syrphidicola (NCBI Ref: NC_021284.1); Prevotella intermedia (NCBI Ref: NC_017861.1); Spiroplasma taiwanense (NCBI Ref: NC_021846.1); Streptococcus iniae (NCBI Ref: NC_021314.1); Belliella baltica (NCBI Ref: NC_018010.1); Psychroflexus torquis (NCBI Ref: NC_018721.1); Streptococcus thermophilus (NCBI Ref: YP_820832.1); Listeria innocua (NCBI Ref: NP_472073.1); Campylobacter jejuni (NCBI Ref: YP_002344900.1); Neisseria meningitidis (NCBI Ref: YP_002342100.1), Streptococcus pyogenes, or Staphylococcus aureus.

[0210] Cas9 nuclease sequences and structures are well known to those of skill in the art (See, e.g., “Complete genome sequence of an Ml strain of Streptococcus pyogenes.” Ferretti et al., Proc. Natl. Acad. Sci. U.S.A. 98:4658-4663(2001); “CRISPR RNA maturation by trans-encoded small RNA and host factor RNase III.” Deltcheva E., et al., Nature 471:602-607(2011); and “A programmable dual-RNA-guided DNA endonuclease in adaptive bacterial immunity.” Jinek M., et al., Science 337:816-821(2012), the entire contents of each of which are incorporated herein by reference). Cas9 orthologs have been described in various species, including, but not limited to, S. pyogenes and S. thermophilus. Additional suitable Cas9 nucleases and sequences will be apparent to those of skill in the art based on this disclosure, and such Cas9 nucleases and sequences include Cas9 sequences from the organisms and loci disclosed in Chylinski, Rhun, and Charpentier, “The tracrRNA and Cas9 families of type II CRISPR-Cas immunity systems” (2013) RNA Biology 10:5, 726-737; the entire contents of which are incorporated herein by reference.

### High Fidelity Cas9 Domains

[0211] Some aspects of the disclosure provide high fidelity Cas9 domains. High fidelity Cas9 domains are known in the art and described, for example, in Kleinstiver, B. P., et al. “High-fidelity CRISPR-Cas9 nucleases with no detectable genome-wide off-target effects.” Nature 529, 490-495 (2016); and Slaymaker, I. M., et al. “Rationally engineered Cas9 nucleases with improved specificity.” Science 351, 84-88 (2015); the entire contents of each of which are incorporated herein by reference. An Exemplary high fidelity Cas9 domain is provided in the Sequence Listing as SEQ ID NO: 237. In some embodiments, high fidelity Cas9 domains are engineered Cas9 domains comprising one or more mutations that decrease electrostatic interactions between the Cas9 domain and the sugar-phosphate backbone of a DNA, relative to a corresponding wild-type Cas9 domain. High fidelity Cas9 domains that have decreased electrostatic interactions with the sugar-phosphate backbone of DNA have less off-target effects. In some embodiments, the Cas9 domain (e.g., a wild type Cas9 domain (SEQ ID NOs: 201 and 204)) comprises one or more mutations that decrease the association between the Cas9 domain and the sugar-phosphate backbone of a DNA. In some embodiments, a Cas9 domain comprises one or more mutations that decreases the association between the Cas9 domain and the sugar-phosphate backbone of DNA by at least 1%, at least 2%, at least 3%, at least 4%, at least 5%, at least 10%, at least 15%, at least 20%, at least 25%, at least 30%, at least 35%, at least 40%, at least 45%, at least 50%, at least 55%, at least 60%, at least 65%, or at least 70%.

[0212] In some embodiments, any of the Cas9 fusion proteins provided herein comprise one or more of a D10A, N497X, a R661X, a Q695X, and/or a Q926X mutation, or a corresponding mutation in any of the amino acid sequences provided herein, wherein X is any amino acid. In some embodiments, the high fidelity Cas9 enzyme is SpCas9(K855A), eSpCas9(1.1), SpCas9-HF1, or hyper accurate Cas9 variant (HypaCas9). In some embodiments, the modified Cas9 eSpCas9(1.1) contains alanine substitutions that weaken the interactions between the HNH/RuvC groove and the non-target DNA strand, preventing strand separation and cutting at off-target sites. Similarly, SpCas9-HF1 lowers off-target editing through alanine substitutions that disrupt Cas9's interactions with the DNA phosphate backbone. HypaCas9 contains mutations (SpCas9 N692A/M694A/Q695A/H698A) in the REC3 domain that increase Cas9 proofreading and target discrimination. All three high fidelity enzymes generate less off-target editing than wildtype Cas9.

Cas9 Domains with Reduced Exclusivity

[0213] Typically, Cas9 proteins, such as Cas9 from S. pyogenes (spCas9), require a “protospacer adjacent motif (PAM)” or PAM-like motif, which is a 2-6 base pair DNA sequence immediately following the DNA sequence targeted by the Cas9 nuclease in the CRISPR bacterial adaptive immune system. The presence of an NGG PAM sequence is required to bind a particular nucleic acid region, where the “N” in “NGG” is adenosine (A), thymidine (T), or cytosine (C), and the G is guanosine. This may limit the ability to edit desired bases within a genome. In some embodiments, the base editing fusion proteins provided herein may need to be placed at a precise location, for example a region comprising a target base that is upstream of the PAM. See e.g., Komor, A. C., et al., “Programmable editing of a target base in genomic DNA without double-stranded DNA cleavage” Nature 533, 420-424 (2016), the entire contents of which are hereby incorporated by reference. Exemplary polypeptide sequences for spCas9 proteins capable of binding a PAM sequence are provided in the Sequence Listing as SEQ ID NOs: 201, 205, and 238-241 Accordingly, in some embodiments, any of the fusion proteins provided herein may contain a Cas9 domain that is capable of binding a nucleotide sequence that does not contain a canonical (e.g., NGG) PAM sequence. Cas9 domains that bind to non-canonical PAM sequences have been described in the art and would be apparent to the skilled artisan. For example, Cas9 domains that bind non-canonical PAM sequences have been described in Kleinstiver, B. P., et al., “Engineered CRISPR-Cas9 nucleases with altered PAM specificities” Nature 523, 481-485 (2015); and Kleinstiver, B. P., et al., “Broadening the targeting range of Staphylococcus aureus CRISPR-Cas9 by modifying PAM recognition” Nature Biotechnology 33, 1293-1298 (2015); the entire contents of each are hereby incorporated by reference.

### Nickases

[0214] In some embodiments, the polynucleotide programmable nucleotide binding domain can comprise a nickase domain. Herein the term “nickase” refers to a polynucleotide programmable nucleotide binding domain comprising a nuclease domain that is capable of cleaving only one strand of the two strands in a duplexed nucleic acid molecule (e.g., DNA). In some embodiments, a nickase can be derived from a fully catalytically active (e.g., natural) form of a polynucleotide programmable nucleotide binding domain by introducing one or more mutations into the active polynucleotide programmable nucleotide binding domain. For example, where a polynucleotide programmable nucleotide binding domain comprises a nickase domain derived from Cas9, the Cas9-derived nickase domain can include a D10A mutation and a histidine at position 840. In such embodiments, the residue H840 retains catalytic activity and can thereby cleave a single strand of the nucleic acid duplex. In another example, a Cas9-derived nickase domain can comprise an H840A mutation, while the amino acid residue at position 10 remains a D. In some embodiments, a nickase can be derived from a fully catalytically active (e.g., natural) form of a polynucleotide programmable nucleotide binding domain by removing all or a portion of a nuclease domain that is not required for the nickase activity. For example, where a polynucleotide programmable nucleotide binding domain comprises a nickase domain derived from Cas9, the Cas9-derived nickase domain can comprise a deletion of all or a portion of the RuvC domain or the HNH domain.

[0215] In some embodiments, wild-type Cas9 corresponds to, or comprises the following amino acid sequence:

(SEQ ID NO: 201)
MDKKYSIGLDIGTNSVGWAVITDEYKVPSKKFKVLGNTDRHSIKKNLIGA
LLFDSGETAEATRLKRTARRRYTRRKNRICYLQEIFSNEMAKVDDSFFHR
LEESFLVEEDKKHERHPIFGNIVDEVAYHEKYPTIYHLRKKLVDSTDKAD
LRLIYLALAHMIKERGHFLIEGDLNPDNSDVDKLFIQLVQTYNQLFEENP
INASGVDAKAILSARLSKSRRLENLIAQLPGEKKNGLFGNLIALSLGLTP
NFKSNFDLAEDAKLQLSKDTYDDDLDNLLAQIGDQYADLFLAAKNLSDAI
LLSDILRVNTEITKAPLSASMIKRYDEHHQDLTLLKALVRQQLPEKYKEI
FFDQSKNGYAGYIDGGASQEEFYKFIKPILEKMDGTEELLVKLNREDLLR
KQRTFDNGSIPHQIHLGELHAILRRQEDFYPFLKDNREKIEKILTFRIPY
YVGPLARGNSRFAWMTRKSEETITPWNFEEVVDKGASAQSFIERMTNFDK
NLPNEKVLPKHSLLYEYFTVYNELTKVKYVTEGMRKPAFLSGEQKKAIVD
LLFKTNRKVTVKQLKEDYFKKIECFDSVEISGVEDRENASLGTYHDLLKI
IKDKDFLDNEENEDILEDIVLTLTLFEDREMIEERLKTYAHLEDDKVMKQ
LKRRRYTGWGRLSRKLINGIRDKQSGKTILDFLKSDGFANRNEMQLIHDD
SLTFKEDIQKAQVSGQGDSLHEHIANLAGSPAIKKGILQTVKVVDELVKV
MGRHKPENIVIEMARENQTTQKGQKNSRERMKRIEEGIKELGSQILKEHP
VENTQLQNEKLYLYYLQNGRDMYVDQELDINRLSDYDVDHIVPQSFLKDD
SIDNKVLTRSDKNRGKSDNVPSEEVVKKMKNYWRQLLNAKLITQRKFDNL
TKAERGGLSELDKAGFIKRQLVETRQITKHVAQILDSRMNTKYDENDKLI
REVKVITLKSKLVSDERKDFQFYKVREINNYHHAHDAYLNAVVGTALIKK
YPKLESEFVYGDYKVYDVRKMIAKSEQEIGKATAKYFFYSNIMNFFKTEI
TLANGEIRKRPLIETNGETGEIVWDKGRDFATVRKVLSMPQVNIVKKTEV
QTGGFSKESILPKRNSDKLIARKKDWDPKKYGGFDSPTVAYSVLVVAKVE
KGKSKKLKSVKELLGITIMERSSFEKNPIDFLEAKGYKEVKKDLIIKLPK
YSLFELENGRKRMLASAGELQKGNELALPSKYVNFLYLASHYEKLKGSPE
DNEQKQLFVEQHKHYLDEIIEQISEFSKRVILADANLDKVLSAYNKHRDK
PIREQAENIIHLFTLTNLGAPAAFKYFDTTIDRKRYTSTKEVLDATLIHQ
SITGLYETRIDLSQLGGD (single underline: HNH domain;
double underline: RuvC domain).

[0216] In some embodiments, the strand of a nucleic acid duplex target polynucleotide sequence that is cleaved by a base editor comprising a nickase domain (e.g., Cas9-derived nickase domain, Cas12-derived nickase domain) is the strand that is not edited by the base editor (i.e., the strand that is cleaved by the base editor is opposite to a strand comprising a base to be edited). In other embodiments, a base editor comprising a nickase domain (e.g., Cas9-derived nickase domain, Cas12-derived nickase domain) can cleave the strand of a DNA molecule which is being targeted for editing. In such embodiments, the non-targeted strand is not cleaved.

In some embodiments, a Cas9 nuclease has an inactive (e.g., an inactivated) DNA cleavage domain, that is, the Cas9 is a nickase, referred to as an “nCas9” protein (for “nickase” Cas9). The Cas9 nickase may be a Cas9 protein that is capable of cleaving only one strand of a duplexed nucleic acid molecule (e.g., a duplexed DNA molecule). In some embodiments the Cas9 nickase cleaves the target strand of a duplexed nucleic acid molecule, meaning that the Cas9 nickase cleaves the strand that is base paired to (complementary to) a gRNA (e.g., an sgRNA) that is bound to the Cas9. In some embodiments, a Cas9 nickase comprises a D10A mutation and has a histidine at position 840. In some embodiments the Cas9 nickase cleaves the non-target, non-base-edited strand of a duplexed nucleic acid molecule, meaning that the Cas9 nickase cleaves the strand that is not base paired to a gRNA (e.g., an sgRNA) that is bound to the Cas9. In some embodiments, a Cas9 nickase comprises an H840A mutation and has an aspartic acid residue at position 10, or a corresponding mutation. In some embodiments the Cas9 nickase comprises an amino acid sequence that is at least 60%, at least 65%, at least 70%, at least 75%, at least 80%, at least 85%, at least 90%, at least 95%, at least 96%, at least 97%, at least 98%, at least 99%, or at least 99.5% identical to any one of the Cas9 nickases provided herein. Additional suitable Cas9 nickases will be apparent to those of skill in the art based on this disclosure and knowledge in the field, and are within the scope of this disclosure.

[0217] The amino acid sequence of an exemplary catalytically Cas9 nickase (nCas9) is as follows:

(SEQ ID NO: 205)
MDKKYSIGLAIGTNSVGWAVITDEYKVPSKKFKVLGNTDRHSIKKNLIGA
LLFDSGETAEATRLKRTARRRYTRRKNRICYLQEIFSNEMAKVDDSFFHR
LEESELVEEDKKHERHPIFGNIVDEVAYHEKYPTIYHLRKKLVDSTDKAD
LRLIYLALAHMIKERGHFLIEGDLNPDNSDVDKLFIQLVQTYNQLFEENP
INASGVDAKAILSARLSKSRRLENLIAQLPGEKKNGLFGNLIALSLGLTP
NFKSNEDLAEDAKLQLSKDTYDDDLDNLLAQIGDQYADLFLAAKNLSDAI
LLSDILRVNTEITKAPLSASMIKRYDEHHQDLTLLKALVRQQLPEKYKEI
FFDQSKNGYAGYIDGGASQEEFYKFIKPILEKMDGTEELLVKLNREDLLR
KQRTEDNGSIPHQIHLGELHAILRRQEDFYPFLKDNREKIEKILTFRIPY
YVGPLARGNSRFAWMTRKSEETITPWNFEEVVDKGASAQSFIERMTNEDK
NLPNEKVLPKHSLLYEYFTVYNELTKVKYVTEGMRKPAFLSGEQKKAIVD
LLFKTNRKVTVKQLKEDYFKKIECFDSVEISGVEDRFNASLGTYHDLLKI
IKDKDELDNEENEDILEDIVLTLTLFEDREMIEERLKTYAHLFDDKVMKQ
LKRRRYTGWGRLSRKLINGIRDKQSGKTILDELKSDGFANRNEMQLIHDD
SLTFKEDIQKAQVSGQGDSLHEHIANLAGSPAIKKGILQTVKVVDELVKV
MGRHKPENIVIEMARENQTTQKGQKNSRERMKRIEEGIKELGSQILKEHP
VENTQLQNEKLYLYYLQNGRDMYVDQELDINRLSDYDVDHIVPQSFLKDD
SIDNKVLTRSDKNRGKSDNVPSEEVVKKMKNYWRQLLNAKLITQRKFDNL
TKAERGGLSELDKAGFIKRQLVETRQITKHVAQILDSRMNTKYDENDKLI
REVKVITLKSKLVSDERKDFQFYKVREINNYHHAHDAYLNAVVGTALIKK
YPKLESEFVYGDYKVYDVRKMIAKSEQEIGKATAKYFFYSNIMNFFKTEI
TLANGEIRKRPLIETNGETGEIVWDKGRDFATVRKVLSMPQVNIVKKTEV
QTGGFSKESILPKRNSDKLIARKKDWDPKKYGGFDSPTVAYSVLVVAKVE
KGKSKKLKSVKELLGITIMERSSFEKNPIDFLEAKGYKEVKKDLIIKLPK
YSLFELENGRKRMLASAGELQKGNELALPSKYVNFLYLASHYEKLKGSPE
DNEQKQLFVEQHKHYLDEIIEQISEFSKRVILADANLDKVLSAYNKHRDK
PIREQAENIIHLFTLTNLGAPAAFKYFDTTIDRKRYTSTKEVLDATLIHQ
SITGLYETRIDLSQLGGD

[0218] The Cas9 nuclease has two functional endonuclease domains: RuvC and HNH. Cas9 undergoes a conformational change upon target binding that positions the nuclease domains to cleave opposite strands of the target DNA. The end result of Cas9-mediated DNA cleavage is a double-strand break (DSB) within the target DNA (˜3-4 nucleotides upstream of the PAM sequence). The resulting DSB is then repaired by one of two general repair pathways: (1) the efficient but error-prone non-homologous end joining (NHEJ) pathway; or (2) the less efficient but high-fidelity homology directed repair (HDR) pathway.

[0219] The “efficiency” of non-homologous end joining (NHEJ) and/or homology directed repair (HDR) can be calculated by any convenient method. For example, in some embodiments, efficiency can be expressed in terms of percentage of successful HDR. For example, a surveyor nuclease assay can be used to generate cleavage products and the ratio of products to substrate can be used to calculate the percentage. For example, a surveyor nuclease enzyme can be used that directly cleaves DNA containing a newly integrated restriction sequence as the result of successful HDR. More cleaved substrate indicates a greater percent HDR (a greater efficiency of HDR). As an illustrative example, a fraction (percentage) of HDR can be calculated using the following equation [(cleavage products)/(substrate plus cleavage products)] (e.g., (b+c)/(a+b+c), where “a” is the band intensity of DNA substrate and “b” and “c” are the cleavage products).

[0220] In some embodiments, efficiency can be expressed in terms of percentage of successful NHEJ. For example, a T7 endonuclease I assay can be used to generate cleavage products and the ratio of products to substrate can be used to calculate the percentage NHEJ. T7 endonuclease I cleaves mismatched heteroduplex DNA which arises from hybridization of wild-type and mutant DNA strands (NHEJ generates small random insertions or deletions (indels) at the site of the original break). More cleavage indicates a greater percent NHEJ (a greater efficiency of NHEJ). As an illustrative example, a fraction (percentage) of NHEJ can be calculated using the following equation: (1−(1−(b+c)/(a+b+c))^{1/2})×100, where “a” is the band intensity of DNA substrate and “b” and “c” are the cleavage products (Ran et. al., Cell. 2013 Sep. 12; 154(6):1380-9; and Ran et al., Nat Protoc. 2013 November; 8(11): 2281-2308).

[0221] The NHEJ repair pathway is the most active repair mechanism, and it frequently causes small nucleotide insertions or deletions (indels) at the DSB site. The randomness of NHEJ-mediated DSB repair has important practical implications because a population of cells expressing Cas9 and a gRNA or a guide polynucleotide can result in a diverse array of mutations. In most embodiments, NHEJ gives rise to small indels in the target DNA that result in amino acid deletions, insertions, or frameshift mutations leading to premature stop codons within the open reading frame (ORF) of the targeted gene. The ideal end result is a loss-of-function mutation within the targeted gene.

[0222] While NHEJ-mediated DSB repair often disrupts the open reading frame of the gene, homology directed repair (HDR) can be used to generate specific nucleotide changes ranging from a single nucleotide change to large insertions like the addition of a fluorophore or tag.

[0223] In order to utilize HDR for gene editing, a DNA repair template containing the desired sequence can be delivered into the cell type of interest with the gRNA(s) and Cas9 or Cas9 nickase. The repair template can contain the desired edit as well as additional homologous sequence immediately upstream and downstream of the target (termed left & right homology arms). The length of each homology arm can be dependent on the size of the change being introduced, with larger insertions requiring longer homology arms. The repair template can be a single-stranded oligonucleotide, double-stranded oligonucleotide, or a double-stranded DNA plasmid. The efficiency of HDR is generally low (<10% of modified alleles) even in cells that express Cas9, gRNA and an exogenous repair template. The efficiency of HDR can be enhanced by synchronizing the cells, since HDR takes place during the S and G2 phases of the cell cycle. Chemically or genetically inhibiting genes involved in NHEJ can also increase HDR frequency.

[0224] In some embodiments, Cas9 is a modified Cas9. A given gRNA targeting sequence can have additional sites throughout the genome where partial homology exists. These sites are called off-targets and need to be considered when designing a gRNA. In addition to optimizing gRNA design, CRISPR specificity can also be increased through modifications to Cas9. Cas9 generates double-strand breaks (DSBs) through the combined activity of two nuclease domains, RuvC and HNH. Cas9 nickase, a D10A mutant of SpCas9, retains one nuclease domain and generates a DNA nick rather than a DSB. The nickase system can also be combined with HDR-mediated gene editing for specific gene edits.

### Catalytically Dead Nucleases

[0225] Also provided herein are base editors comprising a polynucleotide programmable nucleotide binding domain which is catalytically dead (i.e., incapable of cleaving a target polynucleotide sequence). Herein the terms “catalytically dead” and “nuclease dead” are used interchangeably to refer to a polynucleotide programmable nucleotide binding domain which has one or more mutations and/or deletions resulting in its inability to cleave a strand of a nucleic acid. In some embodiments, a catalytically dead polynucleotide programmable nucleotide binding domain base editor can lack nuclease activity as a result of specific point mutations in one or more nuclease domains. For example, in the case of a base editor comprising a Cas9 domain, the Cas9 can comprise both a D10A mutation and an H840A mutation. Such mutations inactivate both nuclease domains, thereby resulting in the loss of nuclease activity. In other embodiments, a catalytically dead polynucleotide programmable nucleotide binding domain can comprise one or more deletions of all or a portion of a catalytic domain (e.g., RuvC1 and/or HNH domains). In further embodiments, a catalytically dead polynucleotide programmable nucleotide binding domain comprises a point mutation (e.g., D10A or H840A) as well as a deletion of all or a portion of a nuclease domain. dCas9 domains are known in the art and described, for example, in Qi et al., “Repurposing CRISPR as an RNA-guided platform for sequence-specific control of gene expression.” Cell. 2013; 152(5):1173-83, the entire contents of which are incorporated herein by reference.

[0226] Additional suitable nuclease-inactive dCas9 domains will be apparent to those of skill in the art based on this disclosure and knowledge in the field, and are within the scope of this disclosure. Such additional exemplary suitable nuclease-inactive Cas9 domains include, but are not limited to, D10A/H840A, D10A/D839A/H840A, and D10A/D839A/H840A/N863A mutant domains (See, e.g., Prashant et al., CAS9 transcriptional activators for target specificity screening and paired nickases for cooperative genome engineering. Nature Biotechnology. 2013; 31(9): 833-838, the entire contents of which are incorporated herein by reference).

[0227] In some embodiments, dCas9 corresponds to, or comprises in part or in whole, a Cas9 amino acid sequence having one or more mutations that inactivate the Cas9 nuclease activity. In some embodiments, the nuclease-inactive dCas9 domain comprises a D10X mutation and a H840X mutation of the amino acid sequence set forth herein, or a corresponding mutation in any of the amino acid sequences provided herein, wherein X is any amino acid change. In some embodiments, the nuclease-inactive dCas9 domain comprises a D10A mutation and a H840A mutation of the amino acid sequence set forth herein, or a corresponding mutation in any of the amino acid sequences provided herein. In some embodiments, a nuclease-inactive Cas9 domain comprises the amino acid sequence set forth in Cloning vector pPlatTET-gRNA2 (Accession No. BAV54124).

[0228] In some embodiments, a variant Cas9 protein can cleave the complementary strand of a guide target sequence but has reduced ability to cleave the non-complementary strand of a double stranded guide target sequence. For example, the variant Cas9 protein can have a mutation (amino acid substitution) that reduces the function of the RuvC domain. As a non-limiting example, in some embodiments, a variant Cas9 protein has a D10A (aspartate to alanine at amino acid position 10) and can therefore cleave the complementary strand of a double stranded guide target sequence but has reduced ability to cleave the non-complementary strand of a double stranded guide target sequence (thus resulting in a single strand break (SSB) instead of a double strand break (DSB) when the variant Cas9 protein cleaves a double stranded target nucleic acid) (see, for example, Jinek et al., Science. 2012 Aug. 17; 337(6096):816-21).

[0229] In some embodiments, a variant Cas9 protein can cleave the non-complementary strand of a double stranded guide target sequence but has reduced ability to cleave the complementary strand of the guide target sequence. For example, the variant Cas9 protein can have a mutation (amino acid substitution) that reduces the function of the HNH domain (RuvC/HNH/RuvC domain motifs). As a non-limiting example, in some embodiments, the variant Cas9 protein has an H840A (histidine to alanine at amino acid position 840) mutation and can therefore cleave the non-complementary strand of the guide target sequence but has reduced ability to cleave the complementary strand of the guide target sequence (thus resulting in a SSB instead of a DSB when the variant Cas9 protein cleaves a double stranded guide target sequence). Such a Cas9 protein has a reduced ability to cleave a guide target sequence (e.g., a single stranded guide target sequence) but retains the ability to bind a guide target sequence (e.g., a single stranded guide target sequence).

[0230] As another non-limiting example, in some embodiments, the variant Cas9 protein harbors W476A and W1126A mutations such that the polypeptide has a reduced ability to cleave a target DNA. Such a Cas9 protein has a reduced ability to cleave a target DNA (e.g., a single stranded target DNA) but retains the ability to bind a target DNA (e.g., a single stranded target DNA).

[0231] As another non-limiting example, in some embodiments, the variant Cas9 protein harbors P475A, W476A, N477A, D1125A, WI 126A, and D1127A mutations such that the polypeptide has a reduced ability to cleave a target DNA. Such a Cas9 protein has a reduced ability to cleave a target DNA (e.g., a single stranded target DNA) but retains the ability to bind a target DNA (e.g., a single stranded target DNA).

[0232] As another non-limiting example, in some embodiments, the variant Cas9 protein harbors H840A, W476A, and W1126A, mutations such that the polypeptide has a reduced ability to cleave a target DNA. Such a Cas9 protein has a reduced ability to cleave a target DNA (e.g., a single stranded target DNA) but retains the ability to bind a target DNA (e.g., a single stranded target DNA). As another non-limiting example, in some embodiments, the variant Cas9 protein harbors H840A, D10A, W476A, and W1126A, mutations such that the polypeptide has a reduced ability to cleave a target DNA. Such a Cas9 protein has a reduced ability to cleave a target DNA (e.g., a single stranded target DNA) but retains the ability to bind a target DNA (e.g., a single stranded target DNA). In some embodiments, the variant Cas9 has restored catalytic His residue at position 840 in the Cas9 HNH domain (A840H).

[0233] As another non-limiting example, in some embodiments, the variant Cas9 protein harbors, H840A, P475A, W476A, N477A, D1125A, W 1126A, and D1127A mutations such that the polypeptide has a reduced ability to cleave a target DNA. Such a Cas9 protein has a reduced ability to cleave a target DNA (e.g., a single stranded target DNA) but retains the ability to bind a target DNA (e.g., a single stranded target DNA). As another non-limiting example, in some embodiments, the variant Cas9 protein harbors D10A, H840A, P475A, W476A, N477A, D1125A, W1126A, and D1127A mutations such that the polypeptide has a reduced ability to cleave a target DNA. Such a Cas9 protein has a reduced ability to cleave a target DNA (e.g., a single stranded target DNA) but retains the ability to bind a target DNA (e.g., a single stranded target DNA). In some embodiments, when a variant Cas9 protein harbors W476A and W1126A mutations or when the variant Cas9 protein harbors P475A, W476A, N477A, D1125A, W1126A, and D1127A mutations, the variant Cas9 protein does not bind efficiently to a PAM sequence. Thus, in some such embodiments, when such a variant Cas9 protein is used in a method of binding, the method does not require a PAM sequence. In other words, in some embodiments, when such a variant Cas9 protein is used in a method of binding, the method can include a guide RNA, but the method can be performed in the absence of a PAM sequence (and the specificity of binding is therefore provided by the targeting segment of the guide RNA). Other residues can be mutated to achieve the above effects (i.e., inactivate one or the other nuclease portions). As non-limiting examples, residues D10, G12, G17, E762, H840, N854, N863, H982, H983, A984, D986, and/or A987 can be altered (i.e., substituted). Also, mutations other than alanine substitutions are suitable.

[0234] In some embodiments, a variant Cas9 protein that has reduced catalytic activity (e.g., when a Cas9 protein has a D10, G12, G17, E762, H840, N854, N863, H982, H983, A984, D986, and/or a A987 mutation, e.g., D10A, G12A, G17A, E762A, H840A, N854A, N863A, H982A, H983A, A984A, and/or D986A), the variant Cas9 protein can still bind to target DNA in a site-specific manner (because it is still guided to a target DNA sequence by a guide RNA) as long as it retains the ability to interact with the guide RNA.

[0235] In some embodiments, the variant Cas protein can be spCas9, spCas9-VRQR, spCas9-VRER, xCas9 (sp), saCas9, saCas9-KKH, spCas9-MQKSER, spCas9-LRKIQK, or spCas9-LRVSQL.

[0236] In some embodiments, the Cas9 domain is a Cas9 domain from Staphylococcus aureus (SaCas9). In some embodiments, the SaCas9 domain is a nuclease active SaCas9, a nuclease inactive SaCas9 (SaCas9d), or a SaCas9 nickase (SaCas9n). In some embodiments, the SaCas9 comprises a N579A mutation, or a corresponding mutation in any of the amino acid sequences provided in the Sequence Listing submitted herewith.

[0237] In some embodiments, the SaCas9 domain, the SaCas9d domain, or the SaCas9n domain can bind to a nucleic acid sequence having a non-canonical PAM. In some embodiments, the SaCas9 domain, the SaCas9d domain, or the SaCas9n domain can bind to a nucleic acid sequence having a NNGRRT or a NNGRRV PAM sequence. In some embodiments, the SaCas9 domain comprises one or more of a E781X, a N967X, and a R1014X mutation, or a corresponding mutation in any of the amino acid sequences provided herein, wherein X is any amino acid. In some embodiments, the SaCas9 domain comprises one or more of a E781K, a N967K, and a R1014H mutation, or one or more corresponding mutation in any of the amino acid sequences provided herein. In some embodiments, the SaCas9 domain comprises a E781K, a N967K, or a R1014H mutation, or corresponding mutations in any of the amino acid sequences provided herein.

[0238] In some embodiments, one of the Cas9 domains present in the fusion protein may be replaced with a guide nucleotide sequence-programmable DNA-binding protein domain that has no requirements for a PAM sequence. In some embodiments, the Cas9 is an SaCas9. Residue A579 of SaCas9 can be mutated from N579 to yield a SaCas9 nickase. Residues K781, K967, and H1014 can be mutated from E781, N967, and R1014 to yield a SaKKH Cas9.

[0239] In some embodiments, a modified SpCas9 including amino acid substitutions D1135M, S1136Q, G1218K, E1219F, A1322R, D1332A, R1335E, and T1337R (SpCas9-MQKFRAER) and having specificity for the altered PAM 5′-NGC-3′ was used.

[0240] Alternatives to S. pyogenes Cas9 can include RNA-guided endonucleases from the Cpf1 family that display cleavage activity in mammalian cells. CRISPR from Prevotella and Francisella 1 (CRISPR/Cpf1) is a DNA-editing technology analogous to the CRISPR/Cas9 system. Cpf1 is an RNA-guided endonuclease of a class II CRISPR/Cas system. This acquired immune mechanism is found in Prevotella and Francisella bacteria. Cpf1 genes are associated with the CRISPR locus, coding for an endonuclease that use a guide RNA to find and cleave viral DNA. Cpf1 is a smaller and simpler endonuclease than Cas9, overcoming some of the CRISPR/Cas9 system limitations. Unlike Cas9 nucleases, the result of Cpf1-mediated DNA cleavage is a double-strand break with a short 3′ overhang. Cpf1 's staggered cleavage pattern can open up the possibility of directional gene transfer, analogous to traditional restriction enzyme cloning, which can increase the efficiency of gene editing. Like the Cas9 variants and orthologues described above, Cpf1 can also expand the number of sites that can be targeted by CRISPR to AT-rich regions or AT-rich genomes that lack the NGG PAM sites favored by SpCas9. The Cpf1 locus contains a mixed alpha/beta domain, a RuvC-I followed by a helical region, a RuvC-II and a zinc finger-like domain. The Cpf1 protein has a RuvC-like endonuclease domain that is similar to the RuvC domain of Cas9.

[0241] Furthermore, Cpf1, unlike Cas9, does not have a HNH endonuclease domain, and the N-terminal of Cpf1 does not have the alpha-helical recognition lobe of Cas9. Cpf1 CRISPR-Cas domain architecture shows that Cpf1 is functionally unique, being classified as Class 2, type V CRISPR system. The Cpf1 loci encode Cas1, Cas2 and Cas4 proteins that are more similar to types I and III than type II systems. Functional Cpf1 does not require the trans-activating CRISPR RNA (tracrRNA), therefore, only CRISPR (crRNA) is required. This benefits genome editing because Cpf1 is not only smaller than Cas9, but also it has a smaller sgRNA molecule (approximately half as many nucleotides as Cas9). The Cpf1-crRNA complex cleaves target DNA or RNA by identification of a protospacer adjacent motif 5′-YTN-3′ or 5′-TTN-3′ in contrast to the G-rich PAM targeted by Cas9. After identification of PAM, Cpf1 introduces a sticky-end-like DNA double-stranded break having an overhang of 4 or 5 nucleotides.

[0242] In some embodiments, the Cas9 is a Cas9 variant having specificity for an altered PAM sequence. In some embodiments, the Additional Cas9 variants and PAM sequences are described in Miller, S. M., et al. Continuous evolution of SpCas9 variants compatible with non-G PAMs, Nat. Biotechnol. (2020), the entirety of which is incorporated herein by reference. in some embodiments, a Cas9 variate have no specific PAM requirements. In some embodiments, a Cas9 variant, e.g. a SpCas9 variant has specificity for a NRNH PAM, wherein R is A or G and H is A, C, or T. In some embodiments, the SpCas9 variant has specificity for a PAM sequence AAA, TAA, CAA, GAA, TAT, GAT, or CAC. In some embodiments, the SpCas9 variant comprises an amino acid substitution at position 1114, 1134, 1135, 1137, 1139, 1151, 1180, 1188, 1211, 1218, 1219, 1221, 1249, 1256, 1264, 1290, 1318, 1317, 1320, 1321, 1323, 1332, 1333, 1335, 1337, or 1339 or a corresponding position thereof. In some embodiments, the SpCas9 variant comprises an amino acid substitution at position 1114, 1135, 1218, 1219, 1221, 1249, 1320, 1321, 1323, 1332, 1333, 1335, or 1337 or a corresponding position thereof. In some embodiments, the SpCas9 variant comprises an amino acid substitution at position 1114, 1134, 1135, 1137, 1139, 1151, 1180, 1188, 1211, 1219, 1221, 1256, 1264, 1290, 1318, 1317, 1320, 1323, 1333 or a corresponding position thereof. In some embodiments, the SpCas9 variant comprises an amino acid substitution at position 1114, 1131, 1135, 1150, 1156, 1180, 1191, 1218, 1219, 1221, 1227, 1249, 1253, 1286, 1293, 1320, 1321, 1332, 1335, 1339 or a corresponding position thereof. In some embodiments, the SpCas9 variant comprises an amino acid substitution at position 1114, 1127, 1135, 1180, 1207, 1219, 1234, 1286, 1301, 1332, 1335, 1337, 1338, 1349 or a corresponding position thereof. Exemplary amino acid substitutions and PAM specificity of SpCas9 variants are shown in Tables 3A-3D)

TABLE 3A
SpCas9 Variants and PAM specificity

| | SpCas9 amino acid position | | | | | | | | | | | | |
|---|---|---|---|---|---|---|---|---|---|---|---|---|---|
| | 1114 | 1135 | 1218 | 1219 | 1221 | 1249 | 1320 | 1321 | 1323 | 1332 | 1333 | 1335 | 1337 |
| PAM | R | D | G | E | Q | P | A | P | A | D | R | R | T |
| AAA | | N | | V | H | | | | | | G | | |
| AAA | | N | | V | H | | | | | | G | | |
| AAA | | | | V | | | | | | | G | | |
| TAA | G | N | | V | | | | | | | I | | |
| TAA | | N | | V | | | | | | | I | | A |
| TAA | G | N | | V | | | | | | | I | | A |
| CAA | | | | V | | | | | | | K | | |
| CAA | | N | | V | | | | | | | K | | |
| CAA | | N | | V | | | | | | | K | | |
| GAA | | | | V | H | | V | | | | K | | |
| GAA | | N | | V | | | V | | | | K | | |
| GAA | | | | V | H | | V | | | | K | | |
| TAT | | | S | V | H | S | | S | | | | L | |
| TAT | | | S | V | H | S | | S | | | | L | |
| TAT | | | S | V | H | S | | S | | | | L | |
| GAT | | | | V | | | | | | | I | | |
| GAT | | | | V | | | | | D | | | Q | |
| GAT | | | | V | | | | | D | | | Q | |
| CAC | | | | V | | | | | | N | | Q | N |
| CAC | | N | | V | | | | | | | | Q | N |
| CAC | | | | V | | | | | | N | | Q | N |

TABLE 3B
SpCas9 Variants and PAM specificity

| | SpCas9 amino acid position | | | | | | | | | | | | | | | | | | |
|---|---|---|---|---|---|---|---|---|---|---|---|---|---|---|---|---|---|---|---|
| | 1114 | 1134 | 1135 | 1137 | 1139 | 1151 | 1180 | 1188 | 1211 | 1219 | 1221 | 1256 | 1264 | 1290 | 1318 | 1317 | 1320 | 1323 | 1333 |
| PAM | R | F | D | P | V | K | D | K | K | E | Q | Q | H | V | L | N | A | A | R |
| GAA | | | | | | | | | | V | H | | | | | | V | | K |
| GAA | | | N | S | | | | | | V | | | | | | | V | D | K |
| GAA | | | N | | | | | | | V | H | | Y | | | | V | | K |
| CAA | | | N | | | | | | | V | H | | Y | | | | V | | K |
| CAA | G | | N | S | | | | | | V | H | | Y | | | | V | | K |
| CAA | | | N | | | | | R | | V | H | | | | | | V | | K |
| CAA | | | N | | | | G | | R | V | H | | Y | | | | V | | K |
| CAA | | | N | | | | | | | V | H | | Y | | | | V | | K |
| AAA | | | N | | | | G | | | V | H | R | Y | | | | V | D | K |
| CAA | G | | N | | | | G | | | V | H | | Y | | | | V | D | K |
| CAA | | L | N | | | | G | | | V | H | | Y | | | T | V | D | K |
| TAA | G | | N | | | | G | | | V | H | | Y | G | S | | V | D | K |
| TAA | G | | N | | | E | G | | | V | H | | Y | | S | | V | | K |
| TAA | G | | N | | | | G | | | V | H | | Y | | S | | V | D | K |
| TAA | G | | N | | | | G | | R | V | H | | | | | | V | | K |
| TAA | | | N | | | | G | | R | V | H | | Y | | | | V | | K |
| TAA | G | | N | | A | | G | | | V | H | | | | | | V | | K |
| TAA | G | | N | | | | | | | V | H | | | | | | V | | K |

TABLE 3C
SpCas9 Variants and PAM specificity

| | SpCas9 amino acid position | | | | | | | | | | | | | | | | | | | |
|---|---|---|---|---|---|---|---|---|---|---|---|---|---|---|---|---|---|---|---|---|
| | 1114 | 1131 | 1135 | 1150 | 1156 | 1180 | 1191 | 1218 | 1219 | 1221 | 1227 | 1249 | 1253 | 1286 | 1293 | 1320 | 1321 | 1332 | 1335 | 1339 |
| PAM | R | Y | D | E | K | D | K | G | E | Q | A | P | E | N | A | A | P | D | R | T |
| SacB. | | | N | | | | N | | V | H | | | | | | V | S | | L | |
| TAT | | | | | | | | | | | | | | | | | | | | |
| SacB. | | | N | | | | | S | V | H | | S | | | | | S | G | L | |
| TAT | | | | | | | | | | | | | | | | | | | | |
| AAT | | | N | | | | | S | V | H | V | S | | K | T | | S | G | L | I |
| TAT | G | | N | | | G | | S | V | H | | S | K | | | | S | G | L | |
| TAT | G | | N | | | G | | S | V | H | | S | | | | | S | G | L | |
| TAT | G | C | N | | | G | | S | V | H | | S | | | | | S | G | L | |
| TAT | G | C | N | | | G | | S | V | H | | S | | | | | S | G | L | |
| TAT | G | C | N | | | G | | S | V | H | | S | | | | | S | G | L | |
| TAT | G | C | N | | E | G | | S | V | H | | S | | | | | S | G | L | |
| TAT | G | C | N | V | | G | | S | V | H | | S | | | | | S | G | L | |
| TAT | | C | N | | | G | | S | V | H | | S | | | | | S | G | L | |
| TAT | G | C | N | | | G | | S | V | H | | S | | | | | S | G | L | |

TABLE 3D
SpCas9 Variants and PAM specificity

| | SpCas9 amino acid position | | | | | | | | | | | | | |
|---|---|---|---|---|---|---|---|---|---|---|---|---|---|---|
| | 1114 | 1127 | 1135 | 1180 | 1207 | 1219 | 1234 | 1286 | 1301 | 1332 | 1335 | 1337 | 1338 | 1349 |
| PAM | R | D | D | D | E | E | N | N | P | D | R | T | S | H |
| SacB.CAC | | | N | | | V | | | | N | Q | N | | |
| AAC | G | | N | | | V | | | | N | Q | N | | |
| AAC | G | | N | | | V | | | | N | Q | N | | |
| TAC | G | | N | | | V | | | | N | Q | N | | |
| TAC | G | | N | | | V | | H | | N | Q | N | | |
| TAC | G | | N | | G | V | D | H | | N | Q | N | | |
| TAC | G | | N | | | V | | | | N | Q | N | | |
| TAC | G | G | N | E | | V | | H | | N | Q | N | | |
| TAC | G | | N | | | V | | H | | N | Q | N | | |
| TAC | G | | N | | | V | | | | N | Q | N | T | R |

[0243] Further exemplary Cas9 (e.g., SaCas9) polypeptides with modified PAM recognition are described in Kleinstiver, et al. “Broadening the targeting range of Staphylococcus aureus CRISPR-Cas9 by modifying PAM recognition,” Nature Biotechnology, 33:1293-1298 (2015) DOI: 10.1038/nbt.3404, the disclosure of which is incorporated herein by reference in its entirety for all purposes. In some embodiments, a Cas9 variant (e.g., a SaCas9 variant) comprising one or more of the alterations E782K, N929R, N968K, and/or R1015H has specificity for, or is associated with increased editing activities relative to a reference polypeptide (e.g., SaCas9) at an NNNRRT or NNHRRT PAM sequence, where N represents any nucleotide, H represents any nucleotide other than G (i.e., “not G”), and R represents a purine. In embodiments, the Cas9 variant (e.g., a SaCas9 variant) comprises the alterations E782K, N968K, and R1015H or the alterations E782K, K929R, and R1015H.

[0244] In some embodiments, the nucleic acid programmable DNA binding protein (napDNAbp) is a single effector of a microbial CRISPR-Cas system. Single effectors of microbial CRISPR-Cas systems include, without limitation, Cas9, Cpf1, Cas12b/C2c1, and Cas12c/C2c3. Typically, microbial CRISPR-Cas systems are divided into Class 1 and Class 2 systems. Class 1 systems have multisubunit effector complexes, while Class 2 systems have a single protein effector. For example, Cas9 and Cpf1 are Class 2 effectors. In addition to Cas9 and Cpf1, three distinct Class 2 CRISPR-Cas systems (Cas12b/C2c1, and Cas12c/C2c3) have been described by Shmakov et al., “Discovery and Functional Characterization of Diverse Class 2 CRISPR Cas Systems”, Mol. Cell, 2015 Nov. 5; 60(3): 385-397, the entire contents of which is hereby incorporated by reference. Effectors of two of the systems, Cas12b/C2c1, and Cas12c/C2c3, contain RuvC-like endonuclease domains related to Cpf1. A third system contains an effector with two predicated HEPN RNase domains. Production of mature CRISPR RNA is tracrRNA-independent, unlike production of CRISPR RNA by Cas12b/C2c1. Cas12b/C2c1 depends on both CRISPR RNA and tracrRNA for DNA cleavage.

[0245] In some embodiments, the napDNAbp is a circular permutant (e.g., SEQ ID NO: 242).

[0246] The crystal structure of Alicyclobaccillus acidoterrastris Cas12b/C2c1 (AacC2c1) has been reported in complex with a chimeric single-molecule guide RNA (sgRNA). See e.g., Liu et al., “C2c1-sgRNA Complex Structure Reveals RNA-Guided DNA Cleavage Mechanism”, Mol. Cell, 2017 Jan. 19; 65(2):310-322, the entire contents of which are hereby incorporated by reference. The crystal structure has also been reported in Alicyclobacillus acidoterrestris C2c1 bound to target DNAs as ternary complexes. See e.g., Yang et al., “PAM-dependent Target DNA Recognition and Cleavage by C2C1 CRISPR-Cas endonuclease”, Cell, 2016 Dec. 15; 167(7):1814-1828, the entire contents of which are hereby incorporated by reference. Catalytically competent conformations of AacC2c1, both with target and non-target DNA strands, have been captured independently positioned within a single RuvC catalytic pocket, with Cas12b/C2c1-mediated cleavage resulting in a staggered seven-nucleotide break of target DNA. Structural comparisons between Cas12b/C2c1 ternary complexes and previously identified Cas9 and Cpf1 counterparts demonstrate the diversity of mechanisms used by CRISPR-Cas9 systems.

[0247] In some embodiments, the nucleic acid programmable DNA binding protein (napDNAbp) of any of the fusion proteins provided herein may be a Cas12b/C2c1, or a Cas12c/C2c3 protein. In some embodiments, the napDNAbp is a Cas12b/C2c1 protein. In some embodiments, the napDNAbp is a Cas12c/C2c3 protein. In some embodiments, the napDNAbp comprises an amino acid sequence that is at least 85%, at least 90%, at least 91%, at least 92%, at least 93%, at least 94%, at least 95%, at least 96%, at least 97%, at least 98%, at least 99%, or at ease 99.5% identical to a naturally-occurring Cas12b/C2c1 or Cas12c/C2c3 protein. In some embodiments, the napDNAbp is a naturally-occurring Cas12b/C2c1 or Cas12c/C2c3 protein. In some embodiments, the napDNAbp comprises an amino acid sequence that is at least 85%, at least 90%, at least 91%, at least 92%, at least 93%, at least 94%, at least 95%, at least 96%, at least 97%, at least 98%, at least 99%, or at ease 99.5% identical to any one of the napDNAbp sequences provided herein. It should be appreciated that Cas12b/C2c1 or Cas12c/C2c3 from other bacterial species may also be used in accordance with the present disclosure.

[0248] In some embodiments, a napDNAbp refers to Cas12c. In some embodiments, the Cas12c protein is a Cas12c1 (SEQ ID NO: 243) or a variant of Cas12c1. In some embodiments, the Cas12 protein is a Cas12c2 (SEQ ID NO: 244) or a variant of Cas12c2. In some embodiments, the Cas12 protein is a Cas12c protein from Oleiphilus sp. H10009 (i.e., OspCas12c; SEQ ID NO: 245) or a variant of OspCas12c. These Cas12c molecules have been described in Yan et al., “Functionally Diverse Type V CRISPR-Cas Systems,” Science, 2019 Jan. 4; 363: 88-91; the entire contents of which is hereby incorporated by reference. In some embodiments, the napDNAbp comprises an amino acid sequence that is at least 85%, at least 90%, at least 91%, at least 92%, at least 93%, at least 94%, at least 95%, at least 96%, at least 97%, at least 98%, at least 99%, or at least 99.5% identical to a naturally-occurring Cas12c1, Cas12c2, or OspCas12c protein. In some embodiments, the napDNAbp is a naturally-occurring Cas12c1, Cas12c2, or OspCas12c protein. In some embodiments, the napDNAbp comprises an amino acid sequence that is at least 85%, at least 90%, at least 91%, at least 92%, at least 93%, at least 94%, at least 95%, at least 96%, at least 97%, at least 98%, at least 99%, or at ease 99.5% identical to any Cas12c1, Cas12c2, or OspCas12c protein described herein. It should be appreciated that Cas12c1, Cas12c2, or OspCas12c from other bacterial species may also be used in accordance with the present disclosure.

[0249] In some embodiments, a napDNAbp refers to Cas12g, Cas12h, or Cas12i, which have been described in, for example, Yan et al., “Functionally Diverse Type V CRISPR-Cas Systems,” Science, 2019 Jan. 4; 363: 88-91; the entire contents of each is hereby incorporated by reference. Exemplary Cas12g, Cas12h, and Cas12i polypeptide sequences are provided in the Sequence Listing as SEQ ID NOs: 246-249. By aggregating more than 10 terabytes of sequence data, new classifications of Type V Cas proteins were identified that showed weak similarity to previously characterized Class V protein, including Cas12g, Cas12h, and Cas12i. In some embodiments, the Cas12 protein is a Cas12g or a variant of Cas12g. In some embodiments, the Cas12 protein is a Cas12h or a variant of Cas12h. In some embodiments, the Cas12 protein is a Cas12i or a variant of Cas12i. It should be appreciated that other RNA-guided DNA binding proteins may be used as a napDNAbp, and are within the scope of this disclosure. In some embodiments, the napDNAbp comprises an amino acid sequence that is at least 85%, at least 90%, at least 91%, at least 92%, at least 93%, at least 94%, at least 95%, at least 96%, at least 97%, at least 98%, at least 99%, or at least 99.5% identical to a naturally-occurring Cas12g, Cas12h, or Cas12i protein. In some embodiments, the napDNAbp is a naturally-occurring Cas12g, Cas12h, or Cas12i protein. In some embodiments, the napDNAbp comprises an amino acid sequence that is at least 85%, at least 90%, at least 91%, at least 92%, at least 93%, at least 94%, at least 95%, at least 96%, at least 97%, at least 98%, at least 99%, or at ease 99.5% identical to any Cas12g, Cas12h, or Cas12i protein described herein. It should be appreciated that Cas12g, Cas12h, or Cas12i from other bacterial species may also be used in accordance with the present disclosure. In some embodiments, the Cas12i is a Cas12i1 or a Cas12i2.

[0250] In some embodiments, the nucleic acid programmable DNA binding protein (napDNAbp) of any of the fusion proteins provided herein may be a Cas12j/CasΦ protein. Cas12j/CasΦ is described in Pausch et al., “CRISPR-CasΦ from huge phages is a hypercompact genome editor,” Science, 17 Jul. 2020, Vol. 369, Issue 6501, pp. 333-337, which is incorporated herein by reference in its entirety. In some embodiments, the napDNAbp comprises an amino acid sequence that is at least 85%, at least 90%, at least 91%, at least 92%, at least 93%, at least 94%, at least 95%, at least 96%, at least 97%, at least 98%, at least 99%, or at ease 99.5% identical to a naturally-occurring Cas12j/CasΦ protein. In some embodiments, the napDNAbp is a naturally-occurring Cas12j/CasΦ protein. In some embodiments, the napDNAbp is a nuclease inactive (“dead”) Cas12j/CasΦ protein. It should be appreciated that Cas12j/CasΦ from other species may also be used in accordance with the present disclosure.

Fusion Proteins with Internal Insertion

[0251] Provided herein are fusion proteins comprising a heterologous polypeptide fused to a nucleic acid programmable nucleic acid binding protein, for example, a napDNAbp. A heterologous polypeptide can be a polypeptide that is not found in the native or wild-type napDNAbp polypeptide sequence. The heterologous polypeptide can be fused to the napDNAbp at a C-terminal end of the napDNAbp, an N-terminal end of the napDNAbp, or inserted at an internal location of the napDNAbp. In some embodiments, the heterologous polypeptide is a deaminase (e.g., cytidine of adenosine deaminase) or a functional fragment thereof. For example, a fusion protein can comprise a deaminase flanked by an N-terminal fragment and a C-terminal fragment of a Cas9 or Cas12 (e.g., Cas12b/C2c1), polypeptide. In some embodiments, the cytidine deaminase is an APOBEC deaminase (e.g., APOBEC1). In some embodiments, the adenosine deaminase is a TadA (e.g., TadA*7.10 or TadA*8). In some embodiments, the TadA is a TadA*8 or a TadA*9. TadA sequences (e.g., TadA7.10 or TadA*8) as described herein are suitable deaminases for the above-described fusion proteins.

[0252] In some embodiments, the fusion protein comprises the structure:
[0253] NH2-[N-terminal fragment of a napDNAbp]-[deaminase]-[C-terminal fragment of a napDNAbp]-COOH;
[0254] NH2-[N-terminal fragment of a Cas9]-[adenosine deaminase]-[C-terminal fragment of a Cas9]-COOH;
[0255] NH2-[N-terminal fragment of a Cas12]-[adenosine deaminase]-[C-terminal fragment of a Cas12]-COOH;
[0256] NH2-[N-terminal fragment of a Cas9]-[cytidine deaminase]-[C-terminal fragment of a Cas9]-COOH;
[0257] NH2-[N-terminal fragment of a Cas12]-[cytidine deaminase]-[C-terminal fragment of a Cas12]-COOH;
   wherein each instance of “]-[” is an optional linker.

[0258] The deaminase can be a circular permutant deaminase. For example, the deaminase can be a circular permutant adenosine deaminase. In some embodiments, the deaminase is a circular permutant TadA, circularly permutated at amino acid residue 116, 136, or 65 as numbered in the TadA reference sequence.

[0259] The fusion protein can comprise more than one deaminase. The fusion protein can comprise, for example, 1, 2, 3, 4, 5 or more deaminases. In some embodiments, the fusion protein comprises one or two deaminase. The two or more deaminases in a fusion protein can be an adenosine deaminase, a cytidine deaminase, or a combination thereof. The two or more deaminases can be homodimers or heterodimers. The two or more deaminases can be inserted in tandem in the napDNAbp. In some embodiments, the two or more deaminases may not be in tandem in the napDNAbp.

[0260] In some embodiments, the napDNAbp in the fusion protein is a Cas9 polypeptide or a fragment thereof. The Cas9 polypeptide can be a variant Cas9 polypeptide. In some embodiments, the Cas9 polypeptide is a Cas9 nickase (nCas9) polypeptide or a fragment thereof. In some embodiments, the Cas9 polypeptide is a nuclease dead Cas9 (dCas9) polypeptide or a fragment thereof. The Cas9 polypeptide in a fusion protein can be a full-length Cas9 polypeptide. In some cases, the Cas9 polypeptide in a fusion protein may not be a full length Cas9 polypeptide. The Cas9 polypeptide can be truncated, for example, at a N-terminal or C-terminal end relative to a naturally-occurring Cas9 protein. The Cas9 polypeptide can be a circularly permuted Cas9 protein. The Cas9 polypeptide can be a fragment, a portion, or a domain of a Cas9 polypeptide, that is still capable of binding the target polynucleotide and a guide nucleic acid sequence.

[0261] In some embodiments, the Cas9 polypeptide is a Streptococcus pyogenes Cas9 (SpCas9), Staphylococcus aureus Cas9 (SaCas9), Streptococcus thermophilus 1 Cas9 (St1Cas9), or fragments or variants of any of the Cas9 polypeptides described herein.

[0262] In some embodiments, the fusion protein comprises an adenosine deaminase domain and a cytidine deaminase domain inserted within a Cas9. In some embodiments, an adenosine deaminase is fused within a Cas9 and a cytidine deaminase is fused to the C-terminus. In some embodiments, an adenosine deaminase is fused within Cas9 and a cytidine deaminase fused to the N-terminus. In some embodiments, a cytidine deaminase is fused within Cas9 and an adenosine deaminase is fused to the C-terminus. In some embodiments, a cytidine deaminase is fused within Cas9 and an adenosine deaminase fused to the N-terminus.

[0263] Exemplary structures of a fusion protein with an adenosine deaminase and a cytidine deaminase and a Cas9 are provided as follows:
[0264] NH2-[Cas9(adenosine deaminase)]-[cytidine deaminase]-COOH;
[0265] NH2-[cytidine deaminase]-[Cas9(adenosine deaminase)]-COOH;
[0266] NH2-[Cas9(cytidine deaminase)]-[adenosine deaminase]-COOH; or
[0267] NH2-[adenosine deaminase]-[Cas9(cytidine deaminase)]-COOH.

[0268] In some embodiments, the “-” used in the general architecture above indicates the presence of an optional linker.

[0269] In various embodiments, the catalytic domain has DNA modifying activity (e.g., deaminase activity), such as adenosine deaminase activity. In some embodiments, the adenosine deaminase is a TadA (e.g., TadA*7.10). In some embodiments, the TadA is a TadA*8. In some embodiments, a TadA*8 is fused within Cas9 and a cytidine deaminase is fused to the C-terminus. In some embodiments, a TadA*8 is fused within Cas9 and a cytidine deaminase fused to the N-terminus. In some embodiments, a cytidine deaminase is fused within Cas9 and a TadA*8 is fused to the C-terminus. In some embodiments, a cytidine deaminase is fused within Cas9 and a TadA*8 fused to the N-terminus. Exemplary structures of a fusion protein with a TadA*8 and a cytidine deaminase and a Cas9 are provided as follows:
[0270] NH2-[Cas9(TadA*8)]-[cytidine deaminase]-COOH;
[0271] NH2-[cytidine deaminase]-[Cas9(TadA*8)]-COOH;
[0272] NH2-[Cas9(cytidine deaminase)]-[TadA*8]-COOH; or
[0273] NH2-[TadA*8]-[Cas9(cytidine deaminase)]-COOH.

[0274] In some embodiments, the “-” used in the general architecture above indicates the presence of an optional linker.

[0275] The heterologous polypeptide (e.g., deaminase) can be inserted in the napDNAbp (e.g., Cas9 or Cas12 (e.g., Cas12b/C2c1)) at a suitable location, for example, such that the napDNAbp retains its ability to bind the target polynucleotide and a guide nucleic acid. A deaminase (e.g., adenosine deaminase, cytidine deaminase, or adenosine deaminase and cytidine deaminase) can be inserted into a napDNAbp without compromising function of the deaminase (e.g., base editing activity) or the napDNAbp (e.g., ability to bind to target nucleic acid and guide nucleic acid). A deaminase (e.g., adenosine deaminase, cytidine deaminase, or adenosine deaminase and cytidine deaminase) can be inserted in the napDNAbp at, for example, a disordered region or a region comprising a high temperature factor or B-factor as shown by crystallographic studies. Regions of a protein that are less ordered, disordered, or unstructured, for example solvent exposed regions and loops, can be used for insertion without compromising structure or function. A deaminase (e.g., adenosine deaminase, cytidine deaminase, or adenosine deaminase and cytidine deaminase) can be inserted in the napDNAbp in a flexible loop region or a solvent-exposed region. In some embodiments, the deaminase (e.g., adenosine deaminase, cytidine deaminase, or adenosine deaminase and cytidine deaminase) is inserted in a flexible loop of the Cas9 or the Cas12b/C2c1 polypeptide.

[0276] In some embodiments, the insertion location of a deaminase (e.g., adenosine deaminase, cytidine deaminase, or adenosine deaminase and cytidine deaminase) is determined by B-factor analysis of the crystal structure of Cas9 polypeptide. In some embodiments, the deaminase (e.g., adenosine deaminase, cytidine deaminase, or adenosine deaminase and cytidine deaminase) is inserted in regions of the Cas9 polypeptide comprising higher than average B-factors (e.g., higher B factors compared to the total protein or the protein domain comprising the disordered region). B-factor or temperature factor can indicate the fluctuation of atoms from their average position (for example, as a result of temperature-dependent atomic vibrations or static disorder in a crystal lattice). A high B-factor (e.g., higher than average B-factor) for backbone atoms can be indicative of a region with relatively high local mobility. Such a region can be used for inserting a deaminase without compromising structure or function. A deaminase (e.g., adenosine deaminase, cytidine deaminase, or adenosine deaminase and cytidine deaminase) can be inserted at a location with a residue having a Cα atom with a B-factor that is 50%, 60%, 70%, 80%, 90%, 100%, 110%, 120%, 130%, 140%, 150%, 160%, 170%, 180%, 190%, 200%, or greater than 200% more than the average B-factor for the total protein. A deaminase (e.g., adenosine deaminase, cytidine deaminase, or adenosine deaminase and cytidine deaminase) can be inserted at a location with a residue having a Cα atom with a B-factor that is 50%, 60%, 70%, 80%, 90%, 100%, 110%, 120%, 130%, 140%, 150%, 160%, 170%, 180%, 190%,200% or greater than 200% more than the average B-factor for a Cas9 protein domain comprising the residue. Cas9 polypeptide positions comprising a higher than average B-factor can include, for example, residues 768, 792, 1052, 1015, 1022, 1026, 1029, 1067, 1040, 1054, 1068, 1246, 1247, and 1248 as numbered in the above Cas9 reference sequence. Cas9 polypeptide regions comprising a higher than average B-factor can include, for example, residues 792-872, 792-906, and 2-791 as numbered in the above Cas9 reference sequence.

[0277] A heterologous polypeptide (e.g., deaminase) can be inserted in the napDNAbp at an amino acid residue selected from the group consisting of: 768, 791, 792, 1015, 1016, 1022, 1023, 1026, 1029, 1040, 1052, 1054, 1067, 1068, 1069, 1246, 1247, and 1248 as numbered in the above Cas9 reference sequence, or a corresponding amino acid residue in another Cas9 polypeptide. In some embodiments, the heterologous polypeptide is inserted between amino acid positions 768-769, 791-792, 792-793, 1015-1016, 1022-1023, 1026-1027, 1029-1030, 1040-1041, 1052-1053, 1054-1055, 1067-1068, 1068-1069, 1247-1248, or 1248-1249 as numbered in the above Cas9 reference sequence or corresponding amino acid positions thereof. In some embodiments, the heterologous polypeptide is inserted between amino acid positions 769-770, 792-793, 793-794, 1016-1017, 1023-1024, 1027-1028, 1030-1031, 1041-1042, 1053-1054, 1055-1056, 1068-1069, 1069-1070, 1248-1249, or 1249-1250 as numbered in the above Cas9 reference sequence or corresponding amino acid positions thereof. In some embodiments, the heterologous polypeptide replaces an amino acid residue selected from the group consisting of: 768, 791, 792, 1015, 1016, 1022, 1023, 1026, 1029, 1040, 1052, 1054, 1067, 1068, 1069, 1246, 1247, and 1248 as numbered in the above Cas9 reference sequence, or a corresponding amino acid residue in another Cas9 polypeptide. It should be understood that the reference to the above Cas9 reference sequence with respect to insertion positions is for illustrative purposes. The insertions as discussed herein are not limited to the Cas9 polypeptide sequence of the above Cas9 reference sequence, but include insertion at corresponding locations in variant Cas9 polypeptides, for example a Cas9 nickase (nCas9), nuclease dead Cas9 (dCas9), a Cas9 variant lacking a nuclease domain, a truncated Cas9, or a Cas9 domain lacking partial or complete HNH domain.

[0278] A heterologous polypeptide (e.g., deaminase) can be inserted in the napDNAbp at an amino acid residue selected from the group consisting of: 768, 792, 1022, 1026, 1040, 1068, and 1247 as numbered in the above Cas9 reference sequence, or a corresponding amino acid residue in another Cas9 polypeptide. In some embodiments, the heterologous polypeptide is inserted between amino acid positions 768-769, 792-793, 1022-1023, 1026-1027, 1029-1030, 1040-1041, 1068-1069, or 1247-1248 as numbered in the above Cas9 reference sequence or corresponding amino acid positions thereof. In some embodiments, the heterologous polypeptide is inserted between amino acid positions 769-770, 793-794, 1023-1024, 1027-1028, 1030-1031, 1041-1042, 1069-1070, or 1248-1249 as numbered in the above Cas9 reference sequence or corresponding amino acid positions thereof. In some embodiments, the heterologous polypeptide replaces an amino acid residue selected from the group consisting of: 768, 792, 1022, 1026, 1040, 1068, and 1247 as numbered in the above Cas9 reference sequence, or a corresponding amino acid residue in another Cas9 polypeptide.

[0279] A heterologous polypeptide (e.g., deaminase) can be inserted in the napDNAbp at an amino acid residue as described herein, or a corresponding amino acid residue in another Cas9 polypeptide. In an embodiment, a heterologous polypeptide (e.g., deaminase) can be inserted in the napDNAbp at an amino acid residue selected from the group consisting of: 1002, 1003, 1025, 1052-1056, 1242-1247, 1061-1077, 943-947, 686-691, 569-578, 530-539, and 1060-1077 as numbered in the above Cas9 reference sequence, or a corresponding amino acid residue in another Cas9 polypeptide. The deaminase (e.g., adenosine deaminase, cytidine deaminase, or adenosine deaminase and cytidine deaminase) can be inserted at the N-terminus or the C-terminus of the residue or replace the residue. In some embodiments, the deaminase (e.g., adenosine deaminase, cytidine deaminase, or adenosine deaminase and cytidine deaminase) is inserted at the C-terminus of the residue.

[0280] In some embodiments, an adenosine deaminase (e.g., TadA) is inserted at an amino acid residue selected from the group consisting of: 1015, 1022, 1029, 1040, 1068, 1247, 1054, 1026, 768, 1067, 1248, 1052, and 1246 as numbered in the above Cas9 reference sequence, or a corresponding amino acid residue in another Cas9 polypeptide. In some embodiments, an adenosine deaminase (e.g., TadA) is inserted in place of residues 792-872, 792-906, or 2-791 as numbered in the above Cas9 reference sequence, or a corresponding amino acid residue in another Cas9 polypeptide. In some embodiments, the adenosine deaminase is inserted at the N-terminus of an amino acid selected from the group consisting of: 1015, 1022, 1029, 1040, 1068, 1247, 1054, 1026, 768, 1067, 1248, 1052, and 1246 as numbered in the above Cas9 reference sequence, or a corresponding amino acid residue in another Cas9 polypeptide. In some embodiments, the adenosine deaminase is inserted at the C-terminus of an amino acid selected from the group consisting of: 1015, 1022, 1029, 1040, 1068, 1247, 1054, 1026, 768, 1067, 1248, 1052, and 1246 as numbered in the above Cas9 reference sequence, or a corresponding amino acid residue in another Cas9 polypeptide. In some embodiments, the adenosine deaminase is inserted to replace an amino acid selected from the group consisting of: 1015, 1022, 1029, 1040, 1068, 1247, 1054, 1026, 768, 1067, 1248, 1052, and 1246 as numbered in the above Cas9 reference sequence, or a corresponding amino acid residue in another Cas9 polypeptide.

[0281] In some embodiments, a cytidine deaminase (e.g., APOBEC1) is inserted at an amino acid residue selected from the group consisting of: 1016, 1023, 1029, 1040, 1069, and 1247 as numbered in the above Cas9 reference sequence, or a corresponding amino acid residue in another Cas9 polypeptide. In some embodiments, the cytidine deaminase is inserted at the N-terminus of an amino acid selected from the group consisting of: 1016, 1023, 1029, 1040, 1069, and 1247 as numbered in the above Cas9 reference sequence, or a corresponding amino acid residue in another Cas9 polypeptide. In some embodiments, the cytidine deaminase is inserted at the C-terminus of an amino acid selected from the group consisting of: 1016, 1023, 1029, 1040, 1069, and 1247 as numbered in the above Cas9 reference sequence, or a corresponding amino acid residue in another Cas9 polypeptide. In some embodiments, the cytidine deaminase is inserted to replace an amino acid selected from the group consisting of: 1016, 1023, 1029, 1040, 1069, and 1247 as numbered in the above Cas9 reference sequence, or a corresponding amino acid residue in another Cas9 polypeptide.

[0282] In some embodiments, the deaminase (e.g., adenosine deaminase, cytidine deaminase, or adenosine deaminase and cytidine deaminase) is inserted at amino acid residue 768 as numbered in the above Cas9 reference sequence, or a corresponding amino acid residue in another Cas9 polypeptide. In some embodiments, the deaminase (e.g., adenosine deaminase, cytidine deaminase, or adenosine deaminase and cytidine deaminase) is inserted at the N-terminus of amino acid residue 768 as numbered in the above Cas9 reference sequence, or a corresponding amino acid residue in another Cas9 polypeptide. In some embodiments, the deaminase (e.g., adenosine deaminase, cytidine deaminase, or adenosine deaminase and cytidine deaminase) is inserted at the C-terminus of amino acid residue 768 as numbered in the above Cas9 reference sequence, or a corresponding amino acid residue in another Cas9 polypeptide. In some embodiments, the deaminase (e.g., adenosine deaminase, cytidine deaminase, or adenosine deaminase and cytidine deaminase) is inserted to replace amino acid residue 768 as numbered in the above Cas9 reference sequence, or a corresponding amino acid residue in another Cas9 polypeptide.

[0283] In some embodiments, the deaminase (e.g., adenosine deaminase, cytidine deaminase, or adenosine deaminase and cytidine deaminase) is inserted at amino acid residue 791 or is inserted at amino acid residue 792, as numbered in the above Cas9 reference sequence, or a corresponding amino acid residue in another Cas9 polypeptide. In some embodiments, the deaminase (e.g., adenosine deaminase, cytidine deaminase, or adenosine deaminase and cytidine deaminase) is inserted at the N-terminus of amino acid residue 791 or is inserted at the N-terminus of amino acid 792, as numbered in the above Cas9 reference sequence, or a corresponding amino acid residue in another Cas9 polypeptide. In some embodiments, the deaminase (e.g., adenosine deaminase, cytidine deaminase, or adenosine deaminase and cytidine deaminase) is inserted at the C-terminus of amino acid 791 or is inserted at the N-terminus of amino acid 792, as numbered in the above Cas9 reference sequence, or a corresponding amino acid residue in another Cas9 polypeptide. In some embodiments, the deaminase (e.g., adenosine deaminase, cytidine deaminase, or adenosine deaminase and cytidine deaminase) is inserted to replace amino acid 791, or is inserted to replace amino acid 792, as numbered in the above Cas9 reference sequence, or a corresponding amino acid residue in another Cas9 polypeptide.

[0284] In some embodiments, the deaminase (e.g., adenosine deaminase, cytidine deaminase, or adenosine deaminase and cytidine deaminase) is inserted at amino acid residue 1016 as numbered in the above Cas9 reference sequence, or a corresponding amino acid residue in another Cas9 polypeptide. In some embodiments, the deaminase (e.g., adenosine deaminase, cytidine deaminase, or adenosine deaminase and cytidine deaminase) is inserted at the N-terminus of amino acid residue 1016 as numbered in the above Cas9 reference sequence, or a corresponding amino acid residue in another Cas9 polypeptide. In some embodiments, the deaminase (e.g., adenosine deaminase, cytidine deaminase, or adenosine deaminase and cytidine deaminase) is inserted at the C-terminus of amino acid residue 1016 as numbered in the above Cas9 reference sequence, or a corresponding amino acid residue in another Cas9 polypeptide. In some embodiments, the deaminase (e.g., adenosine deaminase, cytidine deaminase, or adenosine deaminase and cytidine deaminase) is inserted to replace amino acid residue 1016 as numbered in the above Cas9 reference sequence, or a corresponding amino acid residue in another Cas9 polypeptide.

[0285] In some embodiments, the deaminase (e.g., adenosine deaminase, cytidine deaminase, or adenosine deaminase and cytidine deaminase) is inserted at amino acid residue 1022, or is inserted at amino acid residue 1023, as numbered in the above Cas9 reference sequence, or a corresponding amino acid residue in another Cas9 polypeptide. In some embodiments, the deaminase (e.g., adenosine deaminase, cytidine deaminase, or adenosine deaminase and cytidine deaminase) is inserted at the N-terminus of amino acid residue 1022 or is inserted at the N-terminus of amino acid residue 1023, as numbered in the above Cas9 reference sequence, or a corresponding amino acid residue in another Cas9 polypeptide. In some embodiments, the deaminase (e.g., adenosine deaminase, cytidine deaminase, or adenosine deaminase and cytidine deaminase) is inserted at the C-terminus of amino acid residue 1022 or is inserted at the C-terminus of amino acid residue 1023, as numbered in the above Cas9 reference sequence, or a corresponding amino acid residue in another Cas9 polypeptide. In some embodiments, the deaminase (e.g., adenosine deaminase, cytidine deaminase, or adenosine deaminase and cytidine deaminase) is inserted to replace amino acid residue 1022, or is inserted to replace amino acid residue 1023, as numbered in the above Cas9 reference sequence, or a corresponding amino acid residue in another Cas9 polypeptide.

[0286] In some embodiments, the deaminase (e.g., adenosine deaminase, cytidine deaminase, or adenosine deaminase and cytidine deaminase) is inserted at amino acid residue 1026, or is inserted at amino acid residue 1029, as numbered in the above Cas9 reference sequence, or a corresponding amino acid residue in another Cas9 polypeptide. In some embodiments, the deaminase (e.g., adenosine deaminase, cytidine deaminase, or adenosine deaminase and cytidine deaminase) is inserted at the N-terminus of amino acid residue 1026 or is inserted at the N-terminus of amino acid residue 1029, as numbered in the above Cas9 reference sequence, or a corresponding amino acid residue in another Cas9 polypeptide. In some embodiments, the deaminase (e.g., adenosine deaminase, cytidine deaminase, or adenosine deaminase and cytidine deaminase) is inserted at the C-terminus of amino acid residue 1026 or is inserted at the C-terminus of amino acid residue 1029, as numbered in the above Cas9 reference sequence, or a corresponding amino acid residue in another Cas9 polypeptide. In some embodiments, the deaminase (e.g., adenosine deaminase, cytidine deaminase, or adenosine deaminase and cytidine deaminase) is inserted to replace amino acid residue 1026, or is inserted to replace amino acid residue 1029, as numbered in the above Cas9 reference sequence, or corresponding amino acid residue in another Cas9 polypeptide.

[0287] In some embodiments, the deaminase (e.g., adenosine deaminase, cytidine deaminase, or adenosine deaminase and cytidine deaminase) is inserted at amino acid residue 1040 as numbered in the above Cas9 reference sequence, or a corresponding amino acid residue in another Cas9 polypeptide. In some embodiments, the deaminase (e.g., adenosine deaminase, cytidine deaminase, or adenosine deaminase and cytidine deaminase) is inserted at the N-terminus of amino acid residue 1040 as numbered in the above Cas9 reference sequence, or a corresponding amino acid residue in another Cas9 polypeptide. In some embodiments, the deaminase (e.g., adenosine deaminase, cytidine deaminase, or adenosine deaminase and cytidine deaminase) is inserted at the C-terminus of amino acid residue 1040 as numbered in the above Cas9 reference sequence, or a corresponding amino acid residue in another Cas9 polypeptide. In some embodiments, the deaminase (e.g., adenosine deaminase, cytidine deaminase, or adenosine deaminase and cytidine deaminase) is inserted to replace amino acid residue 1040 as numbered in the above Cas9 reference sequence, or a corresponding amino acid residue in another Cas9 polypeptide.

[0288] In some embodiments, the deaminase (e.g., adenosine deaminase, cytidine deaminase, or adenosine deaminase and cytidine deaminase) is inserted at amino acid residue 1052, or is inserted at amino acid residue 1054, as numbered in the above Cas9 reference sequence, or a corresponding amino acid residue in another Cas9 polypeptide. In some embodiments, the deaminase (e.g., adenosine deaminase, cytidine deaminase, or adenosine deaminase and cytidine deaminase) is inserted at the N-terminus of amino acid residue 1052 or is inserted at the N-terminus of amino acid residue 1054, as numbered in the above Cas9 reference sequence, or a corresponding amino acid residue in another Cas9 polypeptide. In some embodiments, the deaminase (e.g., adenosine deaminase, cytidine deaminase, or adenosine deaminase and cytidine deaminase) is inserted at the C-terminus of amino acid residue 1052 or is inserted at the C-terminus of amino acid residue 1054, as numbered in the above Cas9 reference sequence, or a corresponding amino acid residue in another Cas9 polypeptide. In some embodiments, the deaminase (e.g., adenosine deaminase, cytidine deaminase, or adenosine deaminase and cytidine deaminase) is inserted to replace amino acid residue 1052, or is inserted to replace amino acid residue 1054, as numbered in the above Cas9 reference sequence, or a corresponding amino acid residue in another Cas9 polypeptide.

[0289] In some embodiments, the deaminase (e.g., adenosine deaminase, cytidine deaminase, or adenosine deaminase and cytidine deaminase) is inserted at amino acid residue 1067, or is inserted at amino acid residue 1068, or is inserted at amino acid residue 1069, as numbered in the above Cas9 reference sequence, or a corresponding amino acid residue in another Cas9 polypeptide. In some embodiments, the deaminase (e.g., adenosine deaminase, cytidine deaminase, or adenosine deaminase and cytidine deaminase) is inserted at the N-terminus of amino acid residue 1067 or is inserted at the N-terminus of amino acid residue 1068 or is inserted at the N-terminus of amino acid residue 1069, as numbered in the above Cas9 reference sequence, or a corresponding amino acid residue in another Cas9 polypeptide. In some embodiments, the deaminase (e.g., adenosine deaminase, cytidine deaminase, or adenosine deaminase and cytidine deaminase) is inserted at the C-terminus of amino acid residue 1067 or is inserted at the C-terminus of amino acid residue 1068 or is inserted at the C-terminus of amino acid residue 1069, as numbered in the above Cas9 reference sequence, or a corresponding amino acid residue in another Cas9 polypeptide. In some embodiments, the deaminase (e.g., adenosine deaminase, cytidine deaminase, or adenosine deaminase and cytidine deaminase) is inserted to replace amino acid residue 1067, or is inserted to replace amino acid residue 1068, or is inserted to replace amino acid residue 1069, as numbered in the above Cas9 reference sequence, or a corresponding amino acid residue in another Cas9 polypeptide.

[0290] In some embodiments, the deaminase (e.g., adenosine deaminase, cytidine deaminase, or adenosine deaminase and cytidine deaminase) is inserted at amino acid residue 1246, or is inserted at amino acid residue 1247, or is inserted at amino acid residue 1248, as numbered in the above Cas9 reference sequence, or a corresponding amino acid residue in another Cas9 polypeptide. In some embodiments, the deaminase (e.g., adenosine deaminase, cytidine deaminase, or adenosine deaminase and cytidine deaminase) is inserted at the N-terminus of amino acid residue 1246 or is inserted at the N-terminus of amino acid residue 1247 or is inserted at the N-terminus of amino acid residue 1248, as numbered in the above Cas9 reference sequence, or a corresponding amino acid residue in another Cas9 polypeptide. In some embodiments, the deaminase (e.g., adenosine deaminase, cytidine deaminase, or adenosine deaminase and cytidine deaminase) is inserted at the C-terminus of amino acid residue 1246 or is inserted at the C-terminus of amino acid residue 1247 or is inserted at the C-terminus of amino acid residue 1248, as numbered in the above Cas9 reference sequence, or a corresponding amino acid residue in another Cas9 polypeptide. In some embodiments, the deaminase (e.g., adenosine deaminase, cytidine deaminase, or adenosine deaminase and cytidine deaminase) is inserted to replace amino acid residue 1246, or is inserted to replace amino acid residue 1247, or is inserted to replace amino acid residue 1248, as numbered in the above Cas9 reference sequence, or a corresponding amino acid residue in another Cas9 polypeptide.

[0291] In some embodiments, a heterologous polypeptide (e.g., deaminase) is inserted in a flexible loop of a Cas9 polypeptide. The flexible loop portions can be selected from the group consisting of 530-537, 569-570, 686-691, 943-947, 1002-1025, 1052-1077, 1232-1247, or 1298-1300 as numbered in the above Cas9 reference sequence, or a corresponding amino acid residue in another Cas9 polypeptide. The flexible loop portions can be selected from the group consisting of: 1-529, 538-568, 580-685, 692-942, 948-1001, 1026-1051, 1078-1231, or 1248-1297 as numbered in the above Cas9 reference sequence, or a corresponding amino acid residue in another Cas9 polypeptide.

[0292] A heterologous polypeptide (e.g., adenine deaminase) can be inserted into a Cas9 polypeptide region corresponding to amino acid residues: 1017-1069, 1242-1247, 1052-1056, 1060-1077, 1002-1003, 943-947, 530-537, 568-579, 686-691, 1242-1247, 1298-1300, 1066-1077, 1052-1056, or 1060-1077 as numbered in the above Cas9 reference sequence, or a corresponding amino acid residue in another Cas9 polypeptide.

[0293] A heterologous polypeptide (e.g., adenine deaminase) can be inserted in place of a deleted region of a Cas9 polypeptide. The deleted region can correspond to an N-terminal or C-terminal portion of the Cas9 polypeptide. In some embodiments, the deleted region corresponds to residues 792-872 as numbered in the above Cas9 reference sequence, or a corresponding amino acid residue in another Cas9 polypeptide. In some embodiments, the deleted region corresponds to residues 792-906 as numbered in the above Cas9 reference sequence, or a corresponding amino acid residue in another Cas9 polypeptide. In some embodiments, the deleted region corresponds to residues 2-791 as numbered in the above Cas9 reference sequence, or a corresponding amino acid residue in another Cas9 polypeptide. In some embodiments, the deleted region corresponds to residues 1017-1069 as numbered in the above Cas9 reference sequence, or corresponding amino acid residues thereof.

[0294] Exemplary internal fusions base editors are provided in Table 4 below:

TABLE 4
Insertion loci in Cas9 proteins, where “IBE”
represents “Internal Base Editor”

| BE ID | Modification | Other ID |
|---|---|---|
| IBE001 | Cas9 TadA ins 1015 | ISLAY01 |
| IBE002 | Cas9 TadA ins 1022 | ISLAY02 |
| IBE003 | Cas9 TadA ins 1029 | ISLAY03 |
| IBE004 | Cas9 TadA ins 1040 | ISLAY04 |
| IBE005 | Cas9 TadA ins 1068 | ISLAY05 |
| IBE006 | Cas9 TadA ins 1247 | ISLAY06 |
| IBE007 | Cas9 TadA ins 1054 | ISLAY07 |
| IBE008 | Cas9 TadA ins 1026 | ISLAY08 |
| IBE009 | Cas9 TadA ins 768 | ISLAY09 |
| IBE020 | delta HNH TadA 792 | ISLAY20 |
| IBE021 | N-term fusion single TadA helix truncated 165-end | ISLAY21 |
| IBE029 | TadA-Circular Permutant116 ins1067 | ISLAY29 |
| IBE031 | TadA- Circular Permutant 136 ins1248 | ISLAY31 |
| IBE032 | TadA- Circular Permutant 136ins 1052 | ISLAY32 |
| IBE035 | delta 792-872 TadA ins | ISLAY35 |
| IBE036 | delta 792-906 TadA ins | ISLAY36 |
| IBE043 | TadA-Circular Permutant 65 ins1246 | ISLAY43 |
| IBE044 | TadA ins C-term truncate2 791 | ISLAY44 |

[0295] A heterologous polypeptide (e.g., deaminase) can be inserted within a structural or functional domain of a Cas9 polypeptide. A heterologous polypeptide (e.g., deaminase) can be inserted between two structural or functional domains of a Cas9 polypeptide. A heterologous polypeptide (e.g., deaminase) can be inserted in place of a structural or functional domain of a Cas9 polypeptide, for example, after deleting the domain from the Cas9 polypeptide. The structural or functional domains of a Cas9 polypeptide can include, for example, RuvC 1, RuvC II, RuvC III, Rec1, Rec2, PI, or HNH.

[0296] In some embodiments, the Cas9 polypeptide lacks one or more domains selected from the group consisting of RuvC I, RuvC II, RuvC III, Rec1, Rec2, PI, or HNH domain. In some embodiments, the Cas9 polypeptide lacks a nuclease domain. In some embodiments, the Cas9 polypeptide lacks an HNH domain. In some embodiments, the Cas9 polypeptide lacks a portion of the HNH domain such that the Cas9 polypeptide has reduced or abolished HNH activity. In some embodiments, the Cas9 polypeptide comprises a deletion of the nuclease domain, and the deaminase is inserted to replace the nuclease domain. In some embodiments, the HNH domain is deleted and the deaminase is inserted in its place. In some embodiments, one or more of the RuvC domains is deleted and the deaminase is inserted in its place.

[0297] A fusion protein comprising a heterologous polypeptide can be flanked by a N-terminal and a C-terminal fragment of a napDNAbp. In some embodiments, the fusion protein comprises a deaminase flanked by a N-terminal fragment and a C-terminal fragment of a Cas9 polypeptide. The N terminal fragment or the C terminal fragment can bind the target polynucleotide sequence. The C-terminus of the N terminal fragment or the N-terminus of the C terminal fragment can comprise a part of a flexible loop of a Cas9 polypeptide. The C-terminus of the N terminal fragment or the N-terminus of the C terminal fragment can comprise a part of an alpha-helix structure of the Cas9 polypeptide. The N-terminal fragment or the C-terminal fragment can comprise a DNA binding domain. The N-terminal fragment or the C-terminal fragment can comprise a RuvC domain. The N-terminal fragment or the C-terminal fragment can comprise an HNH domain. In some embodiments, neither of the N-terminal fragment and the C-terminal fragment comprises an HNH domain.

[0298] In some embodiments, the C-terminus of the N terminal Cas9 fragment comprises an amino acid that is in proximity to a target nucleobase when the fusion protein deaminates the target nucleobase. In some embodiments, the N-terminus of the C terminal Cas9 fragment comprises an amino acid that is in proximity to a target nucleobase when the fusion protein deaminates the target nucleobase. The insertion location of different deaminases can be different in order to have proximity between the target nucleobase and an amino acid in the C-terminus of the N terminal Cas9 fragment or the N-terminus of the C terminal Cas9 fragment. For example, the insertion position of an deaminase can be at an amino acid residue selected from the group consisting of 1015, 1022, 1029, 1040, 1068, 1247, 1054, 1026, 768, 1067, 1248, 1052, and 1246 as numbered in the above Cas9 reference sequence, or a corresponding amino acid residue in another Cas9 polypeptide.

[0299] The N-terminal Cas9 fragment of a fusion protein (i.e. the N-terminal Cas9 fragment flanking the deaminase in a fusion protein) can comprise the N-terminus of a Cas9 polypeptide. The N-terminal Cas9 fragment of a fusion protein can comprise a length of at least about: 100, 200, 300, 400, 500, 600, 700, 800, 900, 1000, 1100, 1200, or 1300 amino acids. The N-terminal Cas9 fragment of a fusion protein can comprise a sequence corresponding to amino acid residues: 1-56, 1-95, 1-200, 1-300, 1-400, 1-500, 1-600, 1-700, 1-718, 1-765, 1-780, 1-906, 1-918, or 1-1100 as numbered in the above Cas9 reference sequence, or a corresponding amino acid residue in another Cas9 polypeptide. The N-terminal Cas9 fragment can comprise a sequence comprising at least: 85%, at least 90%, at least 91%, at least 92%, at least 93%, at least 94%, at least 95%, at least 96%, at least 97%, at least 98%, at least 99%, or at least 99.5% sequence identity to amino acid residues: 1-56, 1-95, 1-200, 1-300, 1-400, 1-500, 1-600, 1-700, 1-718, 1-765, 1-780, 1-906, 1-918, or 1-1100 as numbered in the above Cas9 reference sequence, or a corresponding amino acid residue in another Cas9 polypeptide.

[0300] The C-terminal Cas9 fragment of a fusion protein (i.e. the C-terminal Cas9 fragment flanking the deaminase in a fusion protein) can comprise the C-terminus of a Cas9 polypeptide. The C-terminal Cas9 fragment of a fusion protein can comprise a length of at least about: 100, 200, 300, 400, 500, 600, 700, 800, 900, 1000, 1100, 1200, or 1300 amino acids. The C-terminal Cas9 fragment of a fusion protein can comprise a sequence corresponding to amino acid residues: 1099-1368, 918-1368, 906-1368, 780-1368, 765-1368, 718-1368, 94-1368, or 56-1368 as numbered in the above Cas9 reference sequence, or a corresponding amino acid residue in another Cas9 polypeptide. The N-terminal Cas9 fragment can comprise a sequence comprising at least: 85%, at least 90%, at least 91%, at least 92%, at least 93%, at least 94%, at least 95%, at least 96%, at least 97%, at least 98%, at least 99%, or at least 99.5% sequence identity to amino acid residues: 1099-1368, 918-1368, 906-1368, 780-1368, 765-1368, 718-1368, 94-1368, or 56-1368 as numbered in the above Cas9 reference sequence, or a corresponding amino acid residue in another Cas9 polypeptide.

[0301] The N-terminal Cas9 fragment and C-terminal Cas9 fragment of a fusion protein taken together may not correspond to a full-length naturally occurring Cas9 polypeptide sequence, for example, as set forth in the above Cas9 reference sequence.

[0302] The fusion protein described herein can effect targeted deamination with reduced deamination at non-target sites (e.g., off-target sites), such as reduced genome wide spurious deamination. The fusion protein described herein can effect targeted deamination with reduced bystander deamination at non-target sites. The undesired deamination or off-target deamination can be reduced by at least 30%, at least 40%, at least 50%, at least 60%, at least 70%, at least 80%, at least 90%, at least 95%, or at least 99% compared with, for example, an end terminus fusion protein comprising the deaminase fused to a N terminus or a C terminus of a Cas9 polypeptide. The undesired deamination or off-target deamination can be reduced by at least one-fold, at least two-fold, at least three-fold, at least four-fold, at least five-fold, at least tenfold, at least fifteen fold, at least twenty fold, at least thirty fold, at least forty fold, at least fifty fold, at least 60 fold, at least 70 fold, at least 80 fold, at least 90 fold, or at least hundred fold, compared with, for example, an end terminus fusion protein comprising the deaminase fused to a N terminus or a C terminus of a Cas9 polypeptide.

[0303] In some embodiments, the deaminase (e.g., adenosine deaminase, cytidine deaminase, or adenosine deaminase and cytidine deaminase) of the fusion protein deaminates no more than two nucleobases within the range of an R-loop. In some embodiments, the deaminase of the fusion protein deaminates no more than three nucleobases within the range of the R-loop. In some embodiments, the deaminase of the fusion protein deaminates no more than 2, 3, 4, 5, 6, 7, 8, 9, or 10 nucleobases within the range of the R-loop. An R-loop is a three-stranded nucleic acid structure including a DNA:RNA hybrid, a DNA:DNA or an RNA: RNA complementary structure and the associated with single-stranded DNA. As used herein, an R-loop may be formed when a target polynucleotide is contacted with a CRISPR complex or a base editing complex, wherein a portion of a guide polynucleotide, e.g. a guide RNA, hybridizes with and displaces with a portion of a target polynucleotide, e.g. a target DNA. In some embodiments, an R-loop comprises a hybridized region of a spacer sequence and a target DNA complementary sequence. An R-loop region may be of about 5, 6, 7, 8, 9, 10, 11, 12, 13, 14, 15, 16, 17, 18, 19, 20, 21, 22, 23, 24, 25, 26, 27, 28, 29, 30, 31, 32, 33, 34, 35, 36, 37, 38, 39, 40, 41, 42, 43, 44, 45, 46, 47, 48, 49, or 50 nucleobase pairs in length. In some embodiments, the R-loop region is about 20 nucleobase pairs in length. It should be understood that, as used herein, an R-loop region is not limited to the target DNA strand that hybridizes with the guide polynucleotide. For example, editing of a target nucleobase within an R-loop region may be to a DNA strand that comprises the complementary strand to a guide RNA, or may be to a DNA strand that is the opposing strand of the strand complementary to the guide RNA. In some embodiments, editing in the region of the R-loop comprises editing a nucleobase on non-complementary strand (protospacer strand) to a guide RNA in a target DNA sequence.

[0304] The fusion protein described herein can effect target deamination in an editing window different from canonical base editing. In some embodiments, a target nucleobase is from about 1 to about 20 bases upstream of a PAM sequence in the target polynucleotide sequence. In some embodiments, a target nucleobase is from about 2 to about 12 bases upstream of a PAM sequence in the target polynucleotide sequence. In some embodiments, a target nucleobase is from about 1 to 9 base pairs, about 2 to 10 base pairs, about 3 to 11 base pairs, about 4 to 12 base pairs, about 5 to 13 base pairs, about 6 to 14 base pairs, about 7 to 15 base pairs, about 8 to 16 base pairs, about 9 to 17 base pairs, about 10 to 18 base pairs, about 11 to 19 base pairs, about 12 to 20 base pairs, about 1 to 7 base pairs, about 2 to 8 base pairs, about 3 to 9 base pairs, about 4 to 10 base pairs, about 5 to 11 base pairs, about 6 to 12 base pairs, about 7 to 13 base pairs, about 8 to 14 base pairs, about 9 to 15 base pairs, about 10 to 16 base pairs, about 11 to 17 base pairs, about 12 to 18 base pairs, about 13 to 19 base pairs, about 14 to 20 base pairs, about 1 to 5 base pairs, about 2 to 6 base pairs, about 3 to 7 base pairs, about 4 to 8 base pairs, about 5 to 9 base pairs, about 6 to 10 base pairs, about 7 to 11 base pairs, about 8 to 12 base pairs, about 9 to 13 base pairs, about 10 to 14 base pairs, about 11 to 15 base pairs, about 12 to 16 base pairs, about 13 to 17 base pairs, about 14 to 18 base pairs, about 15 to 19 base pairs, about 16 to 20 base pairs, about 1 to 3 base pairs, about 2 to 4 base pairs, about 3 to 5 base pairs, about 4 to 6 base pairs, about 5 to 7 base pairs, about 6 to 8 base pairs, about 7 to 9 base pairs, about 8 to 10 base pairs, about 9 to 11 base pairs, about 10 to 12 base pairs, about 11 to 13 base pairs, about 12 to 14 base pairs, about 13 to 15 base pairs, about 14 to 16 base pairs, about 15 to 17 base pairs, about 16 to 18 base pairs, about 17 to 19 base pairs, about 18 to 20 base pairs away or upstream of the PAM sequence. In some embodiments, a target nucleobase is about 1, 2, 3, 4, 5, 6, 7, 8, 9, 10, 11, 12, 13, 14, 15, 16, 17, 18, 19, 20, or more base pairs away from or upstream of the PAM sequence. In some embodiments, a target nucleobase is about 1, 2, 3, 4, 5, 6, 7, 8, or 9 base pairs upstream of the PAM sequence. In some embodiments, a target nucleobase is about 2, 3, 4, or 6 base pairs upstream of the PAM sequence.

[0305] The fusion protein can comprise more than one heterologous polypeptide. For example, the fusion protein can additionally comprise one or more UGI domains and/or one or more nuclear localization signals. The two or more heterologous domains can be inserted in tandem. The two or more heterologous domains can be inserted at locations such that they are not in tandem in the NapDNAbp.

[0306] A fusion protein can comprise a linker between the deaminase and the napDNAbp polypeptide. The linker can be a peptide or a non-peptide linker. For example, the linker can be an XTEN, (GGGS)n (SEQ ID NO: 250), (GGGGS)n (SEQ ID NO: 251), (G)n, (EAAAK)n (SEQ ID NO: 252), (GGS)n, SGSETPGTSESATPES (SEQ ID NO: 253). In some embodiments, the fusion protein comprises a linker between the N-terminal Cas9 fragment and the deaminase. In some embodiments, the fusion protein comprises a linker between the C-terminal Cas9 fragment and the deaminase. In some embodiments, the N-terminal and C-terminal fragments of napDNAbp are connected to the deaminase with a linker. In some embodiments, the N-terminal and C-terminal fragments are joined to the deaminase domain without a linker. In some embodiments, the fusion protein comprises a linker between the N-terminal Cas9 fragment and the deaminase, but does not comprise a linker between the C-terminal Cas9 fragment and the deaminase. In some embodiments, the fusion protein comprises a linker between the C-terminal Cas9 fragment and the deaminase, but does not comprise a linker between the N-terminal Cas9 fragment and the deaminase.

[0307] In some embodiments, the napDNAbp in the fusion protein is a Cas12 polypeptide, e.g., Cas12b/C2c1, or a fragment thereof. The Cas12 polypeptide can be a variant Cas12 polypeptide. In other embodiments, the N- or C-terminal fragments of the Cas12 polypeptide comprise a nucleic acid programmable DNA binding domain or a RuvC domain. In other embodiments, the fusion protein contains a linker between the Cas12 polypeptide and the catalytic domain. In other embodiments, the amino acid sequence of the linker is GGSGGS (SEQ ID NO: 254) or GSSGSETPGTSESATPESSG (SEQ ID NO: 255). In other embodiments, the linker is a rigid linker. In other embodiments of the above aspects, the linker is encoded by

(SEQ ID NO: 256)
GGAGGCTCTGGAGGAAGC
or
(SEQ ID NO: 257)
GGCTCTTCTGGATCTGAAACACCTGGCACAAGCGAGAGCGCCACCCCTGA
GAGCTCTGGC.

[0308] Fusion proteins comprising a heterologous catalytic domain flanked by N- and C-terminal fragments of a Cas12 polypeptide are also useful for base editing in the methods as described herein. Fusion proteins comprising Cas12 and one or more deaminase domains, e.g., adenosine deaminase, or comprising an adenosine deaminase domain flanked by Cas12 sequences are also useful for highly specific and efficient base editing of target sequences. In an embodiment, a chimeric Cas12 fusion protein contains a heterologous catalytic domain (e.g., adenosine deaminase, cytidine deaminase, or adenosine deaminase and cytidine deaminase) inserted within a Cas12 polypeptide. In some embodiments, the fusion protein comprises an adenosine deaminase domain and a cytidine deaminase domain inserted within a Cas12. In some embodiments, an adenosine deaminase is fused within Cas12 and a cytidine deaminase is fused to the C-terminus. In some embodiments, an adenosine deaminase is fused within Cas12 and a cytidine deaminase fused to the N-terminus. In some embodiments, a cytidine deaminase is fused within Cas12 and an adenosine deaminase is fused to the C-terminus. In some embodiments, a cytidine deaminase is fused within Cas12 and an adenosine deaminase fused to the N-terminus. Exemplary structures of a fusion protein with an adenosine deaminase and a cytidine deaminase and a Cas12 are provided as follows:
[0309] NH2-[Cas12(adenosine deaminase)]-[cytidine deaminase]-COOH;
[0310] NH2-[cytidine deaminase]-[Cas12(adenosine deaminase)]-COOH;
[0311] NH2-[Cas12(cytidine deaminase)]-[adenosine deaminase]-COOH; or
[0312] NH2-[adenosine deaminase]-[Cas12(cytidine deaminase)]-COOH;

[0313] In some embodiments, the “-” used in the general architecture above indicates the presence of an optional linker.

[0314] In various embodiments, the catalytic domain has DNA modifying activity (e.g., deaminase activity), such as adenosine deaminase activity. In some embodiments, the adenosine deaminase is a TadA (e.g., TadA*7.10). In some embodiments, the TadA is a TadA*8. In some embodiments, a TadA*8 is fused within Cas12 and a cytidine deaminase is fused to the C-terminus. In some embodiments, a TadA*8 is fused within Cas12 and a cytidine deaminase fused to the N-terminus. In some embodiments, a cytidine deaminase is fused within Cas12 and a TadA*8 is fused to the C-terminus. In some embodiments, a cytidine deaminase is fused within Cas12 and a TadA*8 fused to the N-terminus. Exemplary structures of a fusion protein with a TadA*8 and a cytidine deaminase and a Cas12 are provided as follows:
[0315] N-[Cas12(TadA*8)]-[cytidine deaminase]-C;
[0316] N-[cytidine deaminase]-[Cas12(TadA*8)]-C;
[0317] N-[Cas12(cytidine deaminase)]-[TadA*8]-C; or
[0318] N-[TadA*8]-[Cas12(cytidine deaminase)]-C.

[0319] In some embodiments, the “-” used in the general architecture above indicates the presence of an optional linker.

[0320] In other embodiments, the fusion protein contains one or more catalytic domains. In other embodiments, at least one of the one or more catalytic domains is inserted within the Cas12 polypeptide or is fused at the Cas12 N-terminus or C-terminus. In other embodiments, at least one of the one or more catalytic domains is inserted within a loop, an alpha helix region, an unstructured portion, or a solvent accessible portion of the Cas12 polypeptide. In other embodiments, the Cas12 polypeptide is Cas12a, Cas12b, Cas12c, Cas12d, Cas12e, Cas12g, Cas12h, Cas12i, or Cas12j/CasΦ. In other embodiments, the Cas12 polypeptide has at least about 85% amino acid sequence identity to Bacillus hisashii Cas12b, Bacillus thermoamylovorans Cas12b, Bacillus sp. V3-13 Cas12b, or Alicyclobacillus acidiphilus Cas12b (SEQ ID NO: 258). In other embodiments, the Cas12 polypeptide has at least about 90% amino acid sequence identity to Bacillus hisashii Cas12b (SEQ ID NO: 259), Bacillus thermoamylovorans Cas12b, Bacillus sp. V3-13 Cas12b, or Alicyclobacillus acidiphilus Cas12b. In other embodiments, the Cas12 polypeptide has at least about 95% amino acid sequence identity to Bacillus hisashii Cas12b, Bacillus thermoamylovorans Cas12b (SEQ ID NO: 260), Bacillus sp. V3-13 Cas12b (SEQ ID NO: 261), or Alicyclobacillus acidiphilus Cas12b. In other embodiments, the Cas12 polypeptide contains or consists essentially of a fragment of Bacillus hisashii Cas12b, Bacillus thermoamylovorans Cas12b, Bacillus sp. V3-13 Cas12b, or Alicyclobacillus acidiphilus Cas12b. In embodiments, the Cas12 polypeptide contains BvCas12b (V4), which in some embodiments is expressed as 5′ mRNA Cap-5′ UTR-bhCas12b-STOP sequence-3′ UTR-120polyA tail (SEQ ID NOs: 262-264).

[0321] In other embodiments, the catalytic domain is inserted between amino acid positions 153-154, 255-256, 306-307, 980-981, 1019-1020, 534-535, 604-605, or 344-345 of BhCas12b or a corresponding amino acid residue of Cas12a, Cas12c, Cas12d, Cas12e, Cas12g, Cas12h, Cas12i, or Cas12j/CasΦ. In other embodiments, the catalytic domain is inserted between amino acids P153 and S154 of BhCas12b. In other embodiments, the catalytic domain is inserted between amino acids K255 and E256 of BhCas12b. In other embodiments, the catalytic domain is inserted between amino acids D980 and G981 of BhCas12b. In other embodiments, the catalytic domain is inserted between amino acids K1019 and L1020 of BhCas12b. In other embodiments, the catalytic domain is inserted between amino acids F534 and P535 of BhCas12b. In other embodiments, the catalytic domain is inserted between amino acids K604 and G605 of BhCas12b. In other embodiments, the catalytic domain is inserted between amino acids H344 and F345 of BhCas12b. In other embodiments, catalytic domain is inserted between amino acid positions 147 and 148, 248 and 249, 299 and 300, 991 and 992, or 1031 and 1032 of BvCas12b or a corresponding amino acid residue of Cas12a, Cas12c, Cas12d, Cas12e, Cas12g, Cas12h, Cas12i, or Cas12j/CasΦ. In other embodiments, the catalytic domain is inserted between amino acids P147 and D148 of BvCas12b. In other embodiments, the catalytic domain is inserted between amino acids G248 and G249 of BvCas12b. In other embodiments, the catalytic domain is inserted between amino acids P299 and E300 of BvCas12b. In other embodiments, the catalytic domain is inserted between amino acids G991 and E992 of BvCas12b. In other embodiments, the catalytic domain is inserted between amino acids K1031 and M1032 of BvCas12b. In other embodiments, the catalytic domain is inserted between amino acid positions 157 and 158, 258 and 259, 310 and 311, 1008 and 1009, or 1044 and 1045 of AaCas12b or a corresponding amino acid residue of Cas12a, Cas12c, Cas12d, Cas12e, Cas12g, Cas12h, Cas12i, or Cas12j/CasΦ. In other embodiments, the catalytic domain is inserted between amino acids P157 and G158 of AaCas12b. In other embodiments, the catalytic domain is inserted between amino acids V258 and G259 of AaCas12b. In other embodiments, the catalytic domain is inserted between amino acids D310 and P311 of AaCas12b. In other embodiments, the catalytic domain is inserted between amino acids G1008 and E1009 of AaCas12b. In other embodiments, the catalytic domain is inserted between amino acids G1044 and K1045 at of AaCas12b.

[0322] In other embodiments, the fusion protein contains a nuclear localization signal (e.g., a bipartite nuclear localization signal). In other embodiments, the amino acid sequence of the nuclear localization signal is MAPKKKRKVGIHGVPAA (SEQ ID NO: 265). In other embodiments of the above aspects, the nuclear localization signal is encoded by the following sequence: ATGGCCCCAAAGAAGAAGCGGAAGGTCGGTATCCACGGAGTCCCAGCAGCC (SEQ ID NO: 266). In other embodiments, the Cas12b polypeptide contains a mutation that silences the catalytic activity of a RuvC domain. In other embodiments, the Cas12b polypeptide contains D574A, D829A and/or D952A mutations. In other embodiments, the fusion protein further contains a tag (e.g., an influenza hemagglutinin tag).

[0323] In some embodiments, the fusion protein comprises a napDNAbp domain (e.g., Cas12-derived domain) with an internally fused nucleobase editing domain (e.g., all or a portion of a deaminase domain, e.g., an adenosine deaminase domain). In some embodiments, the napDNAbp is a Cas12b. In some embodiments, the base editor comprises a BhCas12b domain with an internally fused TadA*8 domain inserted at the loci provided in Table 5 below.

TABLE 5
Insertion loci in Cas12b proteins

| | Insertion site | Inserted between aa |
|---|---|---|
| BhCas12b | | |
| position 1 | 153 | PS |
| position 2 | 255 | KE |
| position 3 | 306 | DE |
| position 4 | 980 | DG |
| position 5 | 1019 | KL |
| position 6 | 534 | FP |
| position 7 | 604 | KG |
| position 8 | 344 | HF |
| BvCas12b | | |
| position 1 | 147 | PD |
| position 2 | 248 | GG |
| position 3 | 299 | PE |
| position 4 | 991 | GE |
| position 5 | 1031 | KM |
| AaCas12b | | |
| position 1 | 157 | PG |
| position 2 | 258 | VG |
| position 3 | 310 | DP |
| position 4 | 1008 | GE |
| position 5 | 1044 | GK |

[0324] By way of nonlimiting example, an adenosine deaminase (e.g., TadA*8.13) may be inserted into a BhCas12b to produce a fusion protein (e.g., TadA*8.13-BhCas12b) that effectively edits a nucleic acid sequence.

[0325] In some embodiments, the base editing system described herein is an ABE with TadA inserted into a Cas9. Polypeptide sequences of relevant ABEs with TadA inserted into a Cas9 are provided in the attached Sequence Listing as SEQ ID NOs: 267-312.

[0326] In some embodiments, adenosine base editors were generated to insert TadA or variants thereof into the Cas9 polypeptide at the identified positions.

[0327] Exemplary, yet nonlimiting, fusion proteins are described in International PCT Application Nos. PCT/US2020/016285 and U.S. Provisional Application Nos. 62/852,228 and 62/852,224, the contents of which are incorporated by reference herein in their entireties.

### A to G Editing

[0328] In some embodiments, a base editor described herein comprises an adenosine deaminase domain. Such an adenosine deaminase domain of a base editor can facilitate the editing of an adenine (A) nucleobase to a guanine (G) nucleobase by deaminating the A to form inosine (I), which exhibits base pairing properties of G. Adenosine deaminase is capable of deaminating (i.e., removing an amine group) adenine of a deoxyadenosine residue in deoxyribonucleic acid (DNA). In some embodiments, an A-to-G base editor further comprises an inhibitor of inosine base excision repair, for example, a uracil glycosylase inhibitor (UGI) domain or a catalytically inactive inosine specific nuclease. Without wishing to be bound by any particular theory, the UGI domain or catalytically inactive inosine specific nuclease can inhibit or prevent base excision repair of a deaminated adenosine residue (e.g., inosine), which can improve the activity or efficiency of the base editor.

[0329] A base editor comprising an adenosine deaminase can act on any polynucleotide, including DNA, RNA and DNA-RNA hybrids. In certain embodiments, a base editor comprising an adenosine deaminase can deaminate a target A of a polynucleotide comprising RNA. For example, the base editor can comprise an adenosine deaminase domain capable of deaminating a target A of an RNA polynucleotide and/or a DNA-RNA hybrid polynucleotide. In an embodiment, an adenosine deaminase incorporated into a base editor comprises all or a portion of adenosine deaminase acting on RNA (ADAR, e.g., ADAR1 or ADAR2) or tRNA (ADAT). A base editor comprising an adenosine deaminase domain can also be capable of deaminating an A nucleobase of a DNA polynucleotide. In an embodiment an adenosine deaminase domain of a base editor comprises all or a portion of an ADAT comprising one or more mutations which permit the ADAT to deaminate a target A in DNA. For example, the base editor can comprise all or a portion of an ADAT from Escherichia coli (EcTadA) comprising one or more of the following mutations: D108N, A106V, D147Y, E155V, L84F, H123Y, 1156F, or a corresponding mutation in another adenosine deaminase. Exemplary ADAT homolog polypeptide sequences are provided in the Sequence Listing as SEQ ID NOs: 4 and 313-319.

[0330] The adenosine deaminase can be derived from any suitable organism (e.g., E. coli). In some embodiments, the adenosine deaminase is from a prokaryote. In some embodiments, the adenosine deaminase is from a bacterium. In some embodiments, the adenosine deaminase is from Escherichia coli, Staphylococcus aureus, Salmonella typhi, Shewanella putrefaciens, Haemophilus influenzae, Caulobacter crescentus, or Bacillus subtilis. In some embodiments, the adenosine deaminase is from E. coli. In some embodiments, the adenine deaminase is a naturally-occurring adenosine deaminase that includes one or more mutations corresponding to any of the mutations provided herein (e.g., mutations in ecTadA). The corresponding residue in any homologous protein can be identified by e.g., sequence alignment and determination of homologous residues. The mutations in any naturally-occurring adenosine deaminase (e.g., having homology to ecTadA) that correspond to any of the mutations described herein (e.g., any of the mutations identified in ecTadA) can be generated accordingly.

[0331] In some embodiments, the adenosine deaminase comprises an amino acid sequence that is at least 60%, at least 65%, at least 70%, at least 75%, at least 80%, at least 85%, at least 90%, at least 95%, at least 96%, at least 97%, at least 98%, at least 99%, or at least 99.5% identical to any one of the amino acid sequences set forth in any of the adenosine deaminases provided herein. It should be appreciated that adenosine deaminases provided herein may include one or more mutations (e.g., any of the mutations provided herein). The disclosure provides any deaminase domains with a certain percent identify plus any of the mutations or combinations thereof described herein. In some embodiments, the adenosine deaminase comprises an amino acid sequence that has 1, 2, 3, 4, 5, 6, 7, 8, 9, 10, 11, 12, 13, 14, 15, 16, 17, 18, 19, 20, 21, 22, 21, 24, 25, 26, 27, 28, 29, 30, 31, 32, 33, 34, 35, 36, 37, 38, 39, 40, 41, 42, 43, 44, 45, 46, 47, 48, 49, 50, or more mutations compared to a reference sequence, or any of the adenosine deaminases provided herein. In some embodiments, the adenosine deaminase comprises an amino acid sequence that has at least 5, at least 10, at least 15, at least 20, at least 25, at least 30, at least 35, at least 40, at least 45, at least 50, at least 60, at least 70, at least 80, at least 90, at least 100, at least 110, at least 120, at least 130, at least 140, at least 150, at least 160, or at least 170 identical contiguous amino acid residues as compared to any one of the amino acid sequences known in the art or described herein.

[0332] It should be appreciated that any of the mutations provided herein (e.g., based on the TadA reference sequence) can be introduced into other adenosine deaminases, such as E. coli TadA (ecTadA), S. aureus TadA (saTadA), or other adenosine deaminases (e.g., bacterial adenosine deaminases). It would be apparent to the skilled artisan that additional deaminases may similarly be aligned to identify homologous amino acid residues that can be mutated as provided herein. Thus, any of the mutations identified in the TadA reference sequence can be made in other adenosine deaminases (e.g., ecTada) that have homologous amino acid residues. It should also be appreciated that any of the mutations provided herein can be made individually or in any combination in the TadA reference sequence or another adenosine deaminase.

[0333] In some embodiments, the adenosine deaminase comprises a D108X mutation in the TadA reference sequence, or a corresponding mutation in another adenosine deaminase, where X indicates any amino acid other than the corresponding amino acid in the wild-type adenosine deaminase. In some embodiments, the adenosine deaminase comprises a D108G, D108N, D108V, D108A, or D108Y mutation in TadA reference sequence, or a corresponding mutation in another adenosine deaminase. It should be appreciated, however, that additional deaminases may similarly be aligned to identify homologous amino acid residues that can be mutated as provided herein.

[0334] In some embodiments, the adenosine deaminase comprises an A106X mutation in TadA reference sequence, or a corresponding mutation in another adenosine deaminase, where X indicates any amino acid other than the corresponding amino acid in the wild-type adenosine deaminase. In some embodiments, the adenosine deaminase comprises an A106V mutation in TadA reference sequence, or a corresponding mutation in another adenosine deaminase (e.g., ecTadA).

[0335] In some embodiments, the adenosine deaminase comprises a E155X mutation in TadA reference sequence, or a corresponding mutation in another adenosine deaminase, where the presence of X indicates any amino acid other than the corresponding amino acid in the wild-type adenosine deaminase. In some embodiments, the adenosine deaminase comprises a E155D, E155G, or E155V mutation in TadA reference sequence, or a corresponding mutation in another adenosine deaminase (e.g., ecTadA).

[0336] In some embodiments, the adenosine deaminase comprises a D147X mutation in TadA reference sequence, or a corresponding mutation in another adenosine deaminase, where the presence of X indicates any amino acid other than the corresponding amino acid in the wild-type adenosine deaminase. In some embodiments, the adenosine deaminase comprises a D147Y, mutation in TadA reference sequence, or a corresponding mutation in another adenosine deaminase (e.g., ecTadA).

[0337] In some embodiments, the adenosine deaminase comprises an A106X, E155X, or D147X, mutation in the TadA reference sequence, or a corresponding mutation in another adenosine deaminase (e.g., ecTadA), where X indicates any amino acid other than the corresponding amino acid in the wild-type adenosine deaminase. In some embodiments, the adenosine deaminase comprises an E155D, E155G, or E155V mutation. In some embodiments, the adenosine deaminase comprises a D147Y.

[0338] It should also be appreciated that any of the mutations provided herein may be made individually or in any combination in ecTadA or another adenosine deaminase. For example, an adenosine deaminase may contain a D108N, a A106V, a E155V, and/or a D147Y mutation in TadA reference sequence, or a corresponding mutation in another adenosine deaminase (e.g., ecTadA). In some embodiments, an adenosine deaminase comprises the following group of mutations (groups of mutations are separated by a “;”) in TadA reference sequence, or corresponding mutations in another adenosine deaminase: D108N and A106V; D108N and E155V; D108N and D147Y; A106V and E155V; A106V and D147Y; E155V and D147Y; D108N, A106V, and E155V; D108N, A106V, and D147Y; D108N, E155V, and D147Y; A106V, E155V, and D147Y; and D108N, A106V, E155V, and D147Y. It should be appreciated, however, that any combination of corresponding mutations provided herein may be made in an adenosine deaminase (e.g., ecTadA).

[0339] In some embodiments, the adenosine deaminase comprises a combination of mutations in a TadA reference sequence (e.g., TadA*7.10), or corresponding mutations in another adenosine deaminase: V82G+Y147T+Q154S; I76Y+V82G+Y147T+Q154S; L36H+V82G+Y147T+Q154S+N157K; V82G+Y147D+F149Y+Q154S+D167N; L36H+V82G+Y147D+F149Y+Q154S+N157K+D167N; L36H+I76Y+V82G+Y147T+Q154S+N157K; I76Y+V82G+Y147D+F149Y+Q154S+D167N; or L36H+I76Y+V82G+Y147D+F149Y+Q154S+N157K+D167N.

[0340] In some embodiments, the adenosine deaminase comprises one or more of a H8X, T17X, L18X, W23X, L34X, W45X, R51X, A56X, E59X, E85X, M94X, I95X, V102X, F104X, A106X, R107X, D108X, K110X, M118X, N127X, A138X, F149X, M151X, R153X, Q154X, I156X, and/or K157X mutation in TadA reference sequence, or one or more corresponding mutations in another adenosine deaminase, where the presence of X indicates any amino acid other than the corresponding amino acid in the wild-type adenosine deaminase. In some embodiments, the adenosine deaminase comprises one or more of H8Y, T17S, L18E, W23L, L34S, W45L, R51H, A56E, or A56S, E59G, E85K, or E85G, M94L, I95L, V102A, F104L, A106V, R107C, or R107H, or R107P, D108G, or D108N, or D108V, or D108A, or D108Y, K110I, M118K, N127S, A138V, F149Y, M151V, R153C, Q154L, I156D, and/or K157R mutation in TadA reference sequence, or one or more corresponding mutations in another adenosine deaminase.

[0341] In some embodiments, the adenosine deaminase comprises one or more of a H8X, D108X, and/or N127X mutation in TadA reference sequence, or one or more corresponding mutations in another adenosine deaminase, where X indicates the presence of any amino acid. In some embodiments, the adenosine deaminase comprises one or more of a H8Y, D108N, and/or N127S mutation in TadA reference sequence, or one or more corresponding mutations in another adenosine deaminase.

[0342] In some embodiments, the adenosine deaminase comprises one or more of H8X, R26X, M61X, L68X, M70X, A106X, D108X, A109X, N127X, D147X, R152X, Q154X, E155X, K161X, Q163X, and/or T166X mutation in TadA reference sequence, or one or more corresponding mutations in another adenosine deaminase, where X indicates the presence of any amino acid other than the corresponding amino acid in the wild-type adenosine deaminase. In some embodiments, the adenosine deaminase comprises one or more of H8Y, R26W, M61I, L68Q, M70V, A106T, D108N, A109T, N127S, D147Y, R152C, Q154H or Q154R, E155G or E155V or E155D, K161Q, Q163H, and/or T166P mutation in TadA reference sequence, or one or more corresponding mutations in another adenosine deaminase.

[0343] In some embodiments, the adenosine deaminase comprises one, two, three, four, five, or six mutations selected from the group consisting of H8X, D108X, N127X, D147X, R152X, and Q154X in TadA reference sequence, or a corresponding mutation or mutations in another adenosine deaminase (e.g., ecTadA), where X indicates the presence of any amino acid other than the corresponding amino acid in the wild-type adenosine deaminase. In some embodiments, the adenosine deaminase comprises one, two, three, four, five, six, seven, or eight mutations selected from the group consisting of H8X, M61X, M70X, D108X, N127X, Q154X, E155X, and Q163X in TadA reference sequence, or a corresponding mutation or mutations in another adenosine deaminase (e.g., ecTadA), where X indicates the presence of any amino acid other than the corresponding amino acid in the wild-type adenosine deaminase. In some embodiments, the adenosine deaminase comprises one, two, three, four, or five, mutations selected from the group consisting of H8X, D108X, N127X, E155X, and T166X in TadA reference sequence, or a corresponding mutation or mutations in another adenosine deaminase (e.g., ecTadA), where X indicates the presence of any amino acid other than the corresponding amino acid in the wild-type adenosine deaminase.

[0344] In some embodiments, the adenosine deaminase comprises one, two, three, four, five, or six mutations selected from the group consisting of H8X, AT06X, and D108X, or a corresponding mutation or mutations in another adenosine deaminase, where X indicates the presence of any amino acid other than the corresponding amino acid in the wild-type adenosine deaminase. In some embodiments, the adenosine deaminase comprises one, two, three, four, five, six, seven, or eight mutations selected from the group consisting of H8X, R26X, L68X, D108X, N127X, D147X, and E155X, or a corresponding mutation or mutations in another adenosine deaminase, where X indicates the presence of any amino acid other than the corresponding amino acid in the wild-type adenosine deaminase.

[0345] In some embodiments, the adenosine deaminase comprises one, two, three, four, five, six, or seven mutations selected from the group consisting of H8X, R126X, L68X, D108X, N127X, D147X, and E155X in TadA reference sequence, or a corresponding mutation or mutations in another adenosine deaminase, where X indicates the presence of any amino acid other than the corresponding amino acid in the wild-type adenosine deaminase. In some embodiments, the adenosine deaminase comprises one, two, three, four, or five mutations selected from the group consisting of H8X, D108X, A109X, N127X, and E155X in TadA reference sequence, or a corresponding mutation or mutations in another adenosine deaminase, where X indicates the presence of any amino acid other than the corresponding amino acid in the wild-type adenosine deaminase.

[0346] In some embodiments, the adenosine deaminase comprises one, two, three, four, five, or six mutations selected from the group consisting of H8Y, D108N, N127S, D147Y, R152C, and Q154H in TadA reference sequence, or a corresponding mutation or mutations in another adenosine deaminase (e.g., ecTadA). In some embodiments, the adenosine deaminase comprises one, two, three, four, five, six, seven, or eight mutations selected from the group consisting of H8Y, M61I, M70V, D108N, N127S, Q154R, E155G and Q163H in TadA reference sequence, or a corresponding mutation or mutations in another adenosine deaminase (e.g., ecTadA). In some embodiments, the adenosine deaminase comprises one, two, three, four, or five, mutations selected from the group consisting of H8Y, D108N, N127S, E155V, and T166P in TadA reference sequence, or a corresponding mutation or mutations in another adenosine deaminase (e.g., ecTadA). In some embodiments, the adenosine deaminase comprises one, two, three, four, five, or six mutations selected from the group consisting of H8Y, A106T, D108N, N127S, E155D, and K161Q in TadA reference sequence, or a corresponding mutation or mutations in another adenosine deaminase (e.g., ecTadA). In some embodiments, the adenosine deaminase comprises one, two, three, four, five, six, seven, or eight mutations selected from the group consisting of H8Y, R26W, L68Q, D108N, N127S, D147Y, and E155V in TadA reference sequence, or a corresponding mutation or mutations in another adenosine deaminase (e.g., ecTadA). In some embodiments, the adenosine deaminase comprises one, two, three, four, or five, mutations selected from the group consisting of H8Y, D108N, A109T, N127S, and E155G in TadA reference sequence, or a corresponding mutation or mutations in another adenosine deaminase (e.g., ecTadA).

[0347] In some embodiments, the adenosine deaminase comprises one or more of the or one or more corresponding mutations in another adenosine deaminase. In some embodiments, the adenosine deaminase comprises a D108N, D108G, or D108V mutation in TadA reference sequence, or corresponding mutations in another adenosine deaminase. In some embodiments, the adenosine deaminase comprises a A106V and D108N mutation in TadA reference sequence, or corresponding mutations in another adenosine deaminase. In some embodiments, the adenosine deaminase comprises R107C and D108N mutations in TadA reference sequence, or corresponding mutations in another adenosine deaminase. In some embodiments, the adenosine deaminase comprises a H8Y, D108N, N127S, D147Y, and Q154H mutation in TadA reference sequence, or corresponding mutations in another adenosine deaminase. In some embodiments, the adenosine deaminase comprises a H8Y, D108N, N127S, D147Y, and E155V mutation in TadA reference sequence, or corresponding mutations in another adenosine deaminase. In some embodiments, the adenosine deaminase comprises a D108N, D147Y, and E155V mutation in TadA reference sequence, or corresponding mutations in another adenosine deaminase. In some embodiments, the adenosine deaminase comprises a H8Y, D108N, and N127S mutation in TadA reference sequence, or corresponding mutations in another adenosine deaminase. In some embodiments, the adenosine deaminase comprises a A106V, D108N, D147Y, and E155V mutation in TadA reference sequence, or corresponding mutations in another adenosine deaminase (e.g., ecTadA).

[0348] In some embodiments, the adenosine deaminase comprises one or more of S2X, H8X, I49X, L84X, H123X, N127X, I156X, and/or K160X mutation in TadA reference sequence, or one or more corresponding mutations in another adenosine deaminase, where the presence of X indicates any amino acid other than the corresponding amino acid in the wild-type adenosine deaminase. In some embodiments, the adenosine deaminase comprises one or more of S2A, H8Y, I49F, L84F, H123Y, N127S, I156F, and/or K160S mutation in TadA reference sequence, or one or more corresponding mutations in another adenosine deaminase (e.g., ecTadA).

[0349] In some embodiments, the adenosine deaminase comprises an L84X mutation adenosine deaminase, where X indicates any amino acid other than the corresponding amino acid in the wild-type adenosine deaminase. In some embodiments, the adenosine deaminase comprises an L84F mutation in TadA reference sequence, or a corresponding mutation in another adenosine deaminase (e.g., ecTadA).

[0350] In some embodiments, the adenosine deaminase comprises an H123X mutation in TadA reference sequence, or a corresponding mutation in another adenosine deaminase, where X indicates any amino acid other than the corresponding amino acid in the wild-type adenosine deaminase. In some embodiments, the adenosine deaminase comprises an H123Y mutation in TadA reference sequence, or a corresponding mutation in another adenosine deaminase.

[0351] In some embodiments, the adenosine deaminase comprises an I156X mutation in TadA reference sequence, or a corresponding mutation in another adenosine deaminase, where X indicates any amino acid other than the corresponding amino acid in the wild-type adenosine deaminase. In some embodiments, the adenosine deaminase comprises an I156F mutation in TadA reference sequence, or a corresponding mutation in another adenosine deaminase.

[0352] In some embodiments, the adenosine deaminase comprises one, two, three, four, five, six, or seven mutations selected from the group consisting of L84X, A106X, D108X, H123X, D147X, E155X, and I156X in TadA reference sequence, or a corresponding mutation or mutations in another adenosine deaminase, where X indicates the presence of any amino acid other than the corresponding amino acid in the wild-type adenosine deaminase. In some embodiments, the adenosine deaminase comprises one, two, three, four, five, or six mutations selected from the group consisting of S2X, I49X, A106X, D108X, D147X, and E155X in TadA reference sequence, or a corresponding mutation or mutations in another adenosine deaminase, where X indicates the presence of any amino acid other than the corresponding amino acid in the wild-type adenosine deaminase. In some embodiments, the adenosine deaminase comprises one, two, three, four, or five mutations selected from the group consisting of H8X, A106X, D108X, N127X, and K160X in TadA reference sequence, or a corresponding mutation or mutations in another adenosine deaminase, where X indicates the presence of any amino acid other than the corresponding amino acid in the wild-type adenosine deaminase.

[0353] In some embodiments, the adenosine deaminase comprises one, two, three, four, five, six, or seven mutations selected from the group consisting of L84F, A106V, D108N, H123Y, D147Y, E155V, and I156F in TadA reference sequence, or a corresponding mutation or mutations in another adenosine deaminase. In some embodiments, the adenosine deaminase comprises one, two, three, four, five, or six mutations selected from the group consisting of S2A, I49F, A106V, D108N, D147Y, and E155V in TadA reference sequence.

[0354] In some embodiments, the adenosine deaminase comprises one, two, three, four, or five mutations selected from the group consisting of H8Y, A106T, D108N, N127S, and K160S in TadA reference sequence, or a corresponding mutation or mutations in another adenosine deaminase.

[0355] In some embodiments, the adenosine deaminase comprises one or more of a E25X, R26X, R107X, A142X, and/or A143X mutation in TadA reference sequence, or one or more corresponding mutations in another adenosine deaminase, where the presence of X indicates any amino acid other than the corresponding amino acid in the wild-type adenosine deaminase. In some embodiments, the adenosine deaminase comprises one or more of E25M, E25D, E25A, E25R, E25V, E25S, E25Y, R26G, R26N, R26Q, R26C, R26L, R26K, R107P, R107K, R107A, R107N, R107W, R107H, R107S, A142N, A142D, A142G, A143D, A143G, A143E, A143L, A143W, A143M, A143S, A143Q, and/or A143R mutation in TadA reference sequence, or one or more corresponding mutations in another adenosine deaminase. In some embodiments, the adenosine deaminase comprises one or more of the mutations described herein corresponding to TadA reference sequence, or one or more corresponding mutations in another adenosine deaminase.

[0356] In some embodiments, the adenosine deaminase comprises an E25X mutation in TadA reference sequence, or a corresponding mutation in another adenosine deaminase, where X indicates any amino acid other than the corresponding amino acid in the wild-type adenosine deaminase. In some embodiments, the adenosine deaminase comprises an E25M, E25D, E25A, E25R, E25V, E25S, or E25Y mutation in TadA reference sequence, or a corresponding mutation in another adenosine deaminase (e.g., ecTadA).

[0357] In some embodiments, the adenosine deaminase comprises an R26X mutation in TadA reference sequence, or a corresponding mutation in another adenosine deaminase, where X indicates any amino acid other than the corresponding amino acid in the wild-type adenosine deaminase. In some embodiments, the adenosine deaminase comprises R26G, R26N, R26Q, R26C, R26L, or R26K mutation in TadA reference sequence, or a corresponding mutation in another adenosine deaminase (e.g., ecTadA).

[0358] In some embodiments, the adenosine deaminase comprises an R107X mutation in TadA reference sequence, or a corresponding mutation in another adenosine deaminase, where X indicates any amino acid other than the corresponding amino acid in the wild-type adenosine deaminase. In some embodiments, the adenosine deaminase comprises an R107P, R107K, R107A, R107N, R107W, R107H, or R107S mutation in TadA reference sequence, or a corresponding mutation in another adenosine deaminase (e.g., ecTadA).

[0359] In some embodiments, the adenosine deaminase comprises an A142X mutation in TadA reference sequence, or a corresponding mutation in another adenosine deaminase, where X indicates any amino acid other than the corresponding amino acid in the wild-type adenosine deaminase. In some embodiments, the adenosine deaminase comprises an A142N, A142D, A142G, mutation in TadA reference sequence, or a corresponding mutation in another adenosine deaminase (e.g., ecTadA).

[0360] In some embodiments, the adenosine deaminase comprises an A143X mutation in TadA reference sequence, or a corresponding mutation in another adenosine deaminase, where X indicates any amino acid other than the corresponding amino acid in the wild-type adenosine deaminase. In some embodiments, the adenosine deaminase comprises an A143D, A143G, A143E, A143L, A143W, A143M, A143S, A143Q, and/or A143R mutation in TadA reference sequence, or a corresponding mutation in another adenosine deaminase (e.g., ecTadA).

[0361] In some embodiments, the adenosine deaminase comprises one or more of a H36X, N37X, P48X, I49X, R51X, M70X, N72X, D77X, E134X, S146X, Q154X, K157X, and/or K161X mutation in TadA reference sequence, or one or more corresponding mutations in another adenosine deaminase, where the presence of X indicates any amino acid other than the corresponding amino acid in the wild-type adenosine deaminase. In some embodiments, the adenosine deaminase comprises one or more of H36L, N37T, N37S, P48T, P48L, I49V, R51H, R51L, M70L, N72S, D77G, E134G, S146R, S146C, Q154H, K157N, and/or K161T mutation in TadA reference sequence, or one or more corresponding mutations in another adenosine deaminase (e.g., ecTadA).

[0362] In some embodiments, the adenosine deaminase comprises an H36X mutation in TadA reference sequence, or a corresponding mutation in another adenosine deaminase, where X indicates any amino acid other than the corresponding amino acid in the wild-type adenosine deaminase. In some embodiments, the adenosine deaminase comprises an H36L mutation in TadA reference sequence, or a corresponding mutation in another adenosine deaminase.

[0363] In some embodiments, the adenosine deaminase comprises an N37X mutation in TadA reference sequence, or a corresponding mutation in another adenosine deaminase, where X indicates any amino acid other than the corresponding amino acid in the wild-type adenosine deaminase. In some embodiments, the adenosine deaminase comprises an N37T or N37S mutation in TadA reference sequence, or a corresponding mutation in another adenosine deaminase.

[0364] In some embodiments, the adenosine deaminase comprises an P48X mutation in TadA reference sequence, or a corresponding mutation in another adenosine deaminase, where X indicates any amino acid other than the corresponding amino acid in the wild-type adenosine deaminase. In some embodiments, the adenosine deaminase comprises an P48T or P48L mutation in TadA reference sequence, or a corresponding mutation in another adenosine deaminase.

[0365] In some embodiments, the adenosine deaminase comprises an R51X mutation in TadA reference sequence, or a corresponding mutation in another adenosine deaminase, where X indicates any amino acid other than the corresponding amino acid in the wild-type adenosine deaminase. In some embodiments, the adenosine deaminase comprises an R51H or R51L mutation in TadA reference sequence, or a corresponding mutation in another adenosine deaminase.

[0366] In some embodiments, the adenosine deaminase comprises an S146X mutation in TadA reference sequence, or a corresponding mutation in another adenosine deaminase, where X indicates any amino acid other than the corresponding amino acid in the wild-type adenosine deaminase. In some embodiments, the adenosine deaminase comprises an S146R or S146C mutation in TadA reference sequence, or a corresponding mutation in another adenosine deaminase.

[0367] In some embodiments, the adenosine deaminase comprises an K157X mutation in TadA reference sequence, or a corresponding mutation in another adenosine deaminase, where X indicates any amino acid other than the corresponding amino acid in the wild-type adenosine deaminase. In some embodiments, the adenosine deaminase comprises a K157N mutation in TadA reference sequence, or a corresponding mutation in another adenosine deaminase.

[0368] In some embodiments, the adenosine deaminase comprises an P48X mutation in TadA reference sequence, or a corresponding mutation in another adenosine deaminase, where X indicates any amino acid other than the corresponding amino acid in the wild-type adenosine deaminase. In some embodiments, the adenosine deaminase comprises a P48S, P48T, or P48A mutation in TadA reference sequence, or a corresponding mutation in another adenosine deaminase.

[0369] In some embodiments, the adenosine deaminase comprises an A142X mutation in TadA reference sequence, or a corresponding mutation in another adenosine deaminase, where X indicates any amino acid other than the corresponding amino acid in the wild-type adenosine deaminase. In some embodiments, the adenosine deaminase comprises a A142N mutation in TadA reference sequence, or a corresponding mutation in another adenosine deaminase.

[0370] In some embodiments, the adenosine deaminase comprises an W23X mutation in TadA reference sequence, or a corresponding mutation in another adenosine deaminase, where X indicates any amino acid other than the corresponding amino acid in the wild-type adenosine deaminase. In some embodiments, the adenosine deaminase comprises a W23R or W23L mutation in TadA reference sequence, or a corresponding mutation in another adenosine deaminase.

[0371] In some embodiments, the adenosine deaminase comprises an R152X mutation in TadA reference sequence, or a corresponding mutation in another adenosine deaminase, where X indicates any amino acid other than the corresponding amino acid in the wild-type adenosine deaminase. In some embodiments, the adenosine deaminase comprises a R152P or R52H mutation in TadA reference sequence, or a corresponding mutation in another adenosine deaminase.

[0372] In one embodiment, the adenosine deaminase may comprise the mutations H36L, R51L, L84F, A106V, D108N, H123Y, S146C, D147Y, E155V, I156F, and K157N. In some embodiments, the adenosine deaminase comprises the following combination of mutations relative to TadA reference sequence, where each mutation of a combination is separated by a “_” and each combination of mutations is between parentheses:
[0373] (A106V_D108N),
[0374] (R107C_D108N),
[0375] (H8Y_D108N_N127S_D147Y_Q154H),
[0376] (H8Y_D108N_N127S_D147Y_E155V),
[0377] (D108N_D147Y_E155V),
[0378] (H8Y_D108N_N127S),
[0379] (H8Y_D108N_N127S_D147Y_Q154H),
[0380] (A106V_D108N_D147Y_E155V),
[0381] (D108Q_D147Y_E155V),
[0382] (D108M_D147Y_E155V),
[0383] (D108L_D147Y_E155V),
[0384] (D108K_D147Y_E155V),
[0385] (D108I_D147Y_E155V),
[0386] (D108F_D147Y_E155V),
[0387] (A106V_D108N_D147Y),
[0388] (A106V_D108M_D147Y_E155V),
[0389] (E59A_A106V_D108N_D147Y_E155V),
[0390] (E59A cat dead_A106V_D108N_D147Y_E155V),
[0391] (L84F_A106V_D108N_H123Y_D147Y_E155V_I156Y),
[0392] (L84F_A106V_D108N_H123Y_D147Y_E155V_I156F),
[0393] (D103A_D104N),
[0394] (G22P_D103A_D104N),
[0395] (D103A_D104N_S138A),
[0396] (R26G_L84F_A106V_R107H_D108N_H123Y_A142N_A143D_D147Y_E155V_I156F),
[0397] (E25G_R26G_L84F_A106V_R107H_D108N_H123Y_A142N_A143D_D147Y_E155V_I156F),
[0398] (E25D_R26G_L84F_A106V_R107K_D108N_H123Y_A142N_A143G_D147Y_E155V_I156F),
[0399] (R26Q_L84F_A106V_D108N_H123Y_A142N_D147Y_E155V_I156F),
[0400] (E25M_R26G_L84F_A106V_R107P_D108N_H123Y_A142N_A143D_D147Y_E155V_I156F),
[0401] (R26C_L84F_A106V_R107H_D108N_H123Y_A142N_D147Y_E155V_I156F),
[0402] (L84F_A106V_D108N_H123Y_A142N_A143L_D147Y_E155V_I156F),
[0403] (R26G_L84F_A106V_D108N_H123Y_A142N_D147Y_E155V_I156F),
[0404] (E25A_R26G_L84F_A106V_R107N_D108N_H123Y_A142N_A143E_D147Y_E155V_I156F),
[0405] (R26G_L84F_A106V_R107H_D108N_H123Y_A142N_A143D_D147Y_E155V_I156F),
[0406] (A106V_D108N_A142N_D147Y_E155V),
[0407] (R26G_A106V_D108N_A142N_D147Y_E155V),
[0408] (E25D_R26G_A106V_R107K_D108N_A142N_A143G_D147Y_E155V),
[0409] (R26G_A106V_D108N_R107H_A142N_A143D_D147Y_E155V),
[0410] (E25D_R26G_A106V_D108N_A142N_D147Y_E155V),
[0411] (A106V_R107K_D108N_A142N_D147Y_E155V),
[0412] (A106V_D108N_A142N_A143G_D147Y_E155V),
[0413] (A106V_D108N_A142N_A143L_D147Y_E155V),
[0414] (H36L_R51L_L84F_A106V_D108N_H123Y_S146C_D147Y_E155V_I156F_K157N),
[0415] (N37T_P48T_M70L_L84F_A106V_D108N_H123Y_D147Y_149V_E155V_1156F),
[0416] (N37S_L84F_A106V_D108N_H123Y_D147Y_E155V_I156F_K161T),
[0417] (H36L_L84F_A106V_D108N_H123Y_D147Y_Q154H_E155V_I156F),
[0418] (N72S_L84F_A106V_D108N_H123Y_S146R_D147Y_E155V_I156F),
[0419] (H36L_P48L_L84F_A106V_D108N_H123Y_E134G_D147Y_E155V_I156F),
[0420] (H36L_L84F_A106V_D108N_H123Y_D147Y_E155V_I156F_K157N)
[0421] (H36L_L84F_A106V_D108N_H123Y_S146C_D147Y_E155V_I156F),
[0422] (L84F_A106V_D108N_H123Y_S146R_D147Y_E155V_I156F_K161T),
[0423] (N37S_R51H_D77G_L84F_A106V_D108N_H123Y_D147Y_E155V_I156F),
[0424] (R51L_L84F_A106V_D108N_H123Y_D147Y_E155V_I156F_K157N),
[0425] (D24G_Q71R_L84F_H96L_A106V_D108N_H123Y_D147Y_E155V_I156F_K160E),
[0426] (H36L_G67V_L84F_A106V_D108N_H123Y_S146T_D147Y_E155V_I156F),
[0427] (Q71L_L84F_A106V_D108N_H123Y_L137M_A143E_D147Y_E155V_I156F),
[0428] (E25G_L84F_A106V_D108N_H123Y_D147Y_E155V_I156F_Q159L),
[0429] (L84F_A91T_F104I_A106V_D108N_H123Y_D147Y_E155V_I156F),
[0430] (N72D_L84F_A106V_D108N_H123Y_G125A_D147Y_E155V_1156F),
[0431] (P48S_L84F_S97C_A106V_D108N_H123Y_D147Y_E155V_I156F),
[0432] (W23G_L84F_A106V_D108N_H123Y_D147Y_E155V_I156F),
[0433] (D24G_P48L_Q71R_L84F_A106V_D108N_H123Y_D147Y_E155V_I156F_Q159L),
[0434] (L84F_A106V_D108N_H123Y_A142N_D147Y_E155V_I156F),
[0435] (H36L_R51L_L84F_A106V_D108N_H123Y_A142N_S146C_D147Y_E155V_I156F_K157N),
[0436] (N37S_L84F_A106V_D108N_H123Y_A142N_D147Y_E155V_I156F_K161T),
[0437] (L84F_A106V_D108N_D147Y_E155V_I156F),
[0438] (R51L_L84F_A106V_D108N_H123Y_S146C_D147Y_E155V_I156F_K157N_K161T),
[0439] (L84F_A106V_D108N_H123Y_S146C_D147Y_E155V_I156F_K161T),
[0440] (L84F_A106V_D108N_H123Y_S146C_D147Y_E155V_I156F_K157N_K160E_K161T),
[0441] (L84F_A106V_D108N_H123Y_S146C_D147Y_E155V_I156F_K157N_K160E),
[0442] (R74Q_L84F_A106V_D108N_H123Y_D147Y_E155V_I156F),
[0443] (R74A_L84F_A106V_D108N_H123Y_D147Y_E155V_I156F),
[0444] (L84F_A106V_D108N_H123Y_D147Y_E155V_I156F),
[0445] (R74Q_L84F_A106V_D108N_H123Y_D147Y_E155V_I156F),
[0446] (L84F_R98Q_A106V_D108N_H123Y_D147Y_E155V_I156F),
[0447] (L84F_A106V_D108N_H123Y_R129Q_D147Y_E155V_I156F),
[0448] (P48S_L84F_A106V_D108N_H123Y_A142N_D147Y_E155V_I156F),
[0449] (P48S_A142N),
[0450] (P48T_I49V_L84F_A106V_D108N_H123Y_A142N_D147Y_E155V_I156F_L157N),
[0451] (P48T_I49V_A142N),
[0452] (H36L_P48S_R51L_L84F_A106V_D108N_H123Y_S146C_D147Y_E155V_I156F_K157N),
[0453] (H36L_P48S_R51L_L84F_A106V_D108N_H123Y_S146C_A142N_D147Y_E155V_I156F
[0454] (H36L_P48T_I49V_R51L_L84F_A106V_D108N_H123Y_S146C_D147Y_E155V_I156F_K157N),
[0455] (H36L_P48T_I49V_R51L_L84F_A106V_D108N_H123Y_A142N_S146C_D147Y_E155V_I156F_K157N),
[0456] (H36L_P48A_R51L_L84F_A106V_D108N_H123Y_S146C_D147Y_E155V_I156F_K157N),
[0457] (H36L_P48A_R51L_L84F_A106V_D108N_H123Y_A142N_S146C_D147Y_E155V_I156F_K157N),
[0458] (H36L_P48A_R51L_L84F_A106V_D108N_H123Y_S146C_A142N_D147Y_E155V_I156F_K157N),
[0459] (W23L_H36L_P48A_R51L_L84F_A106V_D108N_H123Y_S146C_D147Y_E155V_I156F_K157N),
[0460] (W23R_H36L_P48A_R51L_L84F_A106V_D108N_H123Y_S146C_D147Y_E155V_I156F_K157N),
[0461] (W23L_H36L_P48A_R51L_L84F_A106V_D108N_H123Y_S146R_D147Y_E155V_I156F_K161T),
[0462] (H36L_P48A_R51L_L84F_A106V_D108N_H123Y_S146C_D147Y_R152H_E155V_I156F_K157N),
[0463] (H36L_P48A_R51L_L84F_A106V_D108N_H123Y_S146C_D147Y_R152P_E155V_I156F_K157N),
[0464] (W23L_H36L_P48A_R51L_L84F_A106V_D108N_H123Y_S146C_D147Y_R152P_E155V_I156F_K157N),
[0465] (W23L_H36L_P48A_R51L_L84F_A106V_D108N_H123Y_A142A_S146C_D147Y_E155V_I156F_K157N),
[0466] (W23L_H36L_P48A_R51L_L84F_A106V_D108N_H123Y_A142A_S146C_D147Y_R152P_E155V_1156F_K157N),
[0467] (W23L_H36L_P48A_R51L_L84F_A106V_D108N_H123Y_S146R_D147Y_E155V_1156F_K161T),
[0468] (W23R_H36L_P48A_R51L_L84F_A106V_D108N_H123Y_S146C_D147Y_R152P_E155V_I156F_K157N), (H36L_P48A_R51L_L84F_A106V_D108N_H123Y_A142N_S146C_D147Y_R152P_E155 V_1156F_K157N).

[0469] In some embodiments, the TadA deaminase is a TadA variant. In some embodiments, the TadA variant is TadA*7.10. In particular embodiments, the fusion proteins comprise a single TadA*7.10 domain (e.g., provided as a monomer). In other embodiments, the fusion protein comprises TadA*7.10 and TadA(wt), which are capable of forming heterodimers. In one embodiment, a fusion protein of the invention comprises a wild-type TadA linked to TadA*7.10, which is linked to Cas9 nickase.

[0470] In some embodiments, TadA*7.10 comprises at least one alteration. In some embodiments, the adenosine deaminase comprises an alteration in the following sequence:

TadA*7.10
(SEQ ID NO: 4)
MSEVEFSHEYWMRHALTLAKRARDEREVPVGAVLVLNNRVIGEGWNRAIG
LHDPTAHAEIMALRQGGLVMQNYRLIDATLYVTFEPCVMCAGAMIHSRIG
RVVFGVRNAKTGAAGSLMDVLHYPGMNHRVEITEGILADECAALLCYFFR
MPRQVFNAQKKAQSSTD

[0471] In some embodiments, TadA*7.10 comprises an alteration at amino acid 82 and/or 166. In particular embodiments, TadA*7.10 comprises one or more of the following alterations: Y147T, Y147R, Q154S, Y123H, V82S, T166R, and/or Q154R. In other embodiments, a variant of TadA*7.10 comprises a combination of alterations selected from the group of: Y147T+Q154R; Y147T+Q154S; Y147R+Q154S; V82S+Q154S; V82S+Y147R; V82S+Q154R; V82S+Y123H; I76Y+V82S; V82S+Y123H+Y147T; V82S+Y123H+Y147R; V82S+Y123H+Q154R; Y147R+Q154R+Y123H; Y147R+Q154R+176Y; Y147R+Q154R+T166R; Y123H+Y147R+Q154R+I76Y; V82S+Y123H+Y147R+Q154R; and I76Y+V82S+Y123H+Y147R+Q154R.

[0472] In some embodiments, a variant of TadA*7.10 comprises one or more of alterations selected from the group of L36H, I76Y, V82G, Y147T, Y147D, F149Y, Q154S, N157K, and/or D167N. In some embodiments, a variant of TadA*7.10 comprises V82G, Y147T/D, Q154S, and one or more of L36H, I76Y, F149Y, N157K, and D167N. In other embodiments, a variant of TadA*7.10 comprises a combination of alterations selected from the group of: V82G+Y147T +Q154S; I76Y+V82G+Y147T+Q154S; L36H+V82G+Y147T+Q154S+N157K; V82G +Y147D+F149Y+Q154S+D167N; L36H+V82G+Y147D+F149Y+Q154S+N157K+D167N; L36H+I76Y+V82G+Y147T+Q154S+N157K; I76Y+V82G+Y147D+F149Y+Q154S+D167N; L36H+I76Y+V82G+Y147D+F149Y+Q154S+N157K+D167N.

[0473] In some embodiments, an adenosine deaminase variant (e.g., TadA*8) comprises a deletion. In some embodiments, an adenosine deaminase variant comprises a deletion of the C terminus. In particular embodiments, an adenosine deaminase variant comprises a deletion of the C terminus beginning at residue 149, 150, 151, 152, 153, 154, 155, 156, and 157, relative to TadA*7.10, the TadA reference sequence, or a corresponding mutation in another TadA.

[0474] In other embodiments, an adenosine deaminase variant (e.g., TadA*8) is a monomer comprising one or more of the following alterations: Y147T, Y147R, Q154S, Y123H, V82S, T166R, and/or Q154R, relative to TadA*7.10, the TadA reference sequence, or a corresponding mutation in another TadA. In other embodiments, the adenosine deaminase variant (TadA*8) is a monomer comprising a combination of alterations selected from the group of: Y147T+Q154R; Y147T+Q154S; Y147R+Q154S; V82S+Q154S; V82S+Y147R; V82S+Q154R; V82S+Y123H; I76Y+V82S; V82S+Y123H+Y147T; V82S+Y123H+Y147R; V82S+Y123H+Q154R; Y147R+Q154R+Y123H; Y147R+Q154R+176Y; Y147R+Q154R+T166R; Y123H+Y147R+Q154R+I76Y; V82S+Y123H+Y147R+Q154R; and I76Y+V82S+Y123H+Y147R+Q154R, relative to TadA*7.10, the TadA reference sequence, or a corresponding mutation in another TadA.

[0475] In other embodiments, the adenosine deaminase variant is a homodimer comprising two adenosine deaminase domains (e.g., TadA*8) each having one or more of the following alterations Y147T, Y147R, Q154S, Y123H, V82S, T166R, and/or Q154R, relative to TadA*7.10, the TadA reference sequence, or a corresponding mutation in another TadA. In other embodiments, the adenosine deaminase variant is a homodimer comprising two adenosine deaminase domains (e.g., TadA*8) each having a combination of alterations selected from the group of: Y147T+Q154R; Y147T+Q154S; Y147R+Q154S; V82S+Q154S; V82S+Y147R; V82S+Q154R; V82S+Y123H; I76Y+V82S; V82S+Y123H+Y147T; V82S+Y123H+Y147R; V82S+Y123H+Q154R; Y147R+Q154R+Y123H; Y147R+Q154R+176Y; Y147R +Q154R+T166R; Y123H+Y147R+Q154R+I76Y; V82S+Y123H+Y147R+Q154R; and I76Y+V82S+Y123H+Y147R+Q154R, relative to TadA*7.10, the TadA reference sequence, or a corresponding mutation in another TadA.

[0476] In other embodiments, a base editor of the disclosure comprising an adenosine deaminase variant (e.g., TadA*8) monomer comprising one or more of the following alterations: R26C, V88A, A109S, T111R, D119N, H122N, Y147D, F149Y, T166I and/or D167N, relative to TadA*7.10, the TadA reference sequence, or a corresponding mutation in another TadA. In other embodiments, the adenosine deaminase variant (TadA*8) monomer comprises a combination of alterations selected from the group of: R26C+A109S+T111R+D119N+H122N+Y147D+F149Y+T166I +D167N; V88A+A109S+T111R+D119N+H122N+F149Y+T166I +D167N; R26C+A109S+T111R+D119N+H122N+F149Y+T166I +D167N; V88A+T111R+D119N+F149Y; and A109S+T111R+D119N+H122N+Yl47D +F149Y+T166I+D167N, relative to TadA*7.10, the TadA reference sequence, or a corresponding mutation in another TadA.

[0477] In some embodiments, an adenosine deaminase variant (e.g., MSP828) is a monomer comprising one or more of the following alterations L36H, I76Y, V82G, Yl47T, Yl47D, F149Y, Q154S, N157K, and/or D167N, relative to TadA*7.10, the TadA reference sequence, or a corresponding mutation in another TadA. In some embodiments, an adenosine deaminase variant (e.g., MSP828) is a monomer comprising V82G, Yl47T/D, Q154S, and one or more of L36H, I76Y, F149Y, N157K, and D167N, relative to TadA*7.10, the TadA reference sequence, or a corresponding mutation in another TadA. In other embodiments, the adenosine deaminase variant (TadA variant) is a monomer comprising a combination of alterations selected from the group of: V82G+Yl47T+Q154S; I76Y+V82G+Yl47T+Q154S; L36H+V82G+Yl47T +Q154S+N157K; V82G+Yl47D+F149Y+Q154S+D167N; L36H+V82G+Yl47D+F149Y+Q154S+N157K+D167N; L36H+I76Y+V82G+Yl47T+Q154S+N157K; I76Y +V82G+Yl47D+F149Y+Q154S+D167N; L36H+I76Y+V82G+Yl47D+F149Y+Q154S+N157K+D167N, relative to TadA*7.10, the TadA reference sequence, or a corresponding mutation in another TadA.

[0478] In other embodiments, the adenosine deaminase variant is a heterodimer of a wild-type adenosine deaminase domain and an adenosine deaminase variant domain (e.g., TadA*8) comprising one or more of the following alterations Yl47T, Yl47R, Q154S, Y123H, V82S, T166R, and/or Q154R, relative to TadA*7.10, the TadA reference sequence, or a corresponding mutation in another TadA. In other embodiments, the adenosine deaminase variant is a heterodimer of a wild-type adenosine deaminase domain and an adenosine deaminase variant domain (e.g., TadA*8) comprising a combination of alterations selected from the group of: Yl47T+Q154R; Yl47T+Q154S; Yl47R+Q154S; V82S+Q154S; V82S+Yl47R; V82S+Q154R; V82S+Y123H; I76Y+V82S; V82S+Y123H+Yl47T; V82S+Y123H+Yl47R; V82S+Y123H+Q154R; Y147R+Q154R+Y123H; Y147R+Q154R+I76Y; Y147R+Q154R+T166R; Y123H+Y147R+Q154R+I76Y; V82S+Y123H+Y147R+Q154R; and I76Y+V82S+Y123H+Y147R+Q154R, relative to TadA*7.10, the TadA reference sequence, or a corresponding mutation in another TadA.

[0479] In other embodiments, a base editor of the disclosure comprising an adenosine deaminase variant (e.g., TadA*8) homodimer comprising two adenosine deaminase domains (e.g., TadA*8) each having one or more of the following alterations R26C, V88A, A109S, T111R, D119N, H122N, Y147D, F149Y, T166I and/or D167N, relative to TadA*7.10, the TadA reference sequence, or a corresponding mutation in another TadA. In other embodiments, the adenosine deaminase variant is a homodimer comprising two adenosine deaminase domains (e.g., TadA*8) each having a combination of alterations selected from the group of: R26C+A109S+T111R+D119N+H122N+Y147D+F149Y+T166I+D167N; V88A+A109S+T111R+D119N+H122N+F149Y+T166I +D167N; R26C+A109S+T111R+D119N+H122N+F149Y+T166I+D167N; V88A+T111R+D119N+F149Y; and A109S+T111R+D119N+H122N+Yl47D+F149Y+T166I+D167N, relative to TadA*7.10, the TadA reference sequence, or a corresponding mutation in another TadA.

[0480] In some embodiments, an adenosine deaminase variant is a homodimer comprising two adenosine deaminase domains (e.g., TadA*7.10) each having one or more of the following alterations L36H, I76Y, V82G, Yl47T, Yl47D, F149Y, Q154S, N157K, and/or D167N, relative to TadA*7.10, the TadA reference sequence, or a corresponding mutation in another TadA. In some embodiments, an adenosine deaminase variant is a homodimer comprising two adenosine deaminase variant domains (e.g., MSP828) each having the following alterations V82G, Yl47T/D, Q154S, and one or more of L36H, I76Y, F149Y, N157K, and D167N, relative to TadA*7.10, the TadA reference sequence, or a corresponding mutation in another TadA. In other embodiments, the adenosine deaminase variant is a homodimer comprising two adenosine deaminase domains (e.g., TadA*7.10) each having a combination of alterations selected from the group of: V82G+Yl47T+Q154S; I76Y+V82G+Yl47T+Q154S; L36H+V82G+Yl47T +Q154S+N157K; V82G+Yl47D+F149Y+Q154S+D167N; L36H+V82G+Yl47D+F149Y+Q154S+N157K+D167N; L36H+I76Y+V82G+Yl47T+Q154S+N157K; I76Y +V82G+Yl47D+F149Y+Q154S+D167N; L36H+I76Y+V82G+Yl47D+F149Y+Q154S+N157K+D167N, relative to TadA*7.10, the TadA reference sequence, or a corresponding mutation in another TadA.

[0481] In other embodiments, the adenosine deaminase variant is a heterodimer of a TadA*7.10 domain and an adenosine deaminase variant domain (e.g., TadA*8) comprising one or more of the following alterations Y147T, Y147R, Q154S, Y123H, V82S, T166R, and/or Q154R, relative to TadA*7.10, the TadA reference sequence, or a corresponding mutation in another TadA. In other embodiments, the adenosine deaminase variant is a heterodimer of a TadA*7.10 domain and an adenosine deaminase variant domain (e.g., TadA*8) comprising a combination of alterations selected from the group of Y147T+Q154R; Y147T+Q154S; Y147R+Q154S; V82S+Q154S; V82S+Y147R; V82S+Q154R; V82S+Y123H; I76Y+V82S; V82S+Y123H+Y147T; V82S+Y123H+Y147R; V82S+Y123H+Q154R; Y147R+Q154R +Y123H; Y147R+Q154R+I76Y; Y147R+Q154R+T166R; Y123H+Y147R+Q154R+I76Y; V82S+Y123H+Y147R+Q154R; and I76Y+V82S+Y123H+Y147R+Q154R, relative to TadA*7.10, the TadA reference sequence, or a corresponding mutation in another TadA.

[0482] In other embodiments, a base editor comprises a heterodimer of a wild-type adenosine deaminase domain and an adenosine deaminase variant domain (e.g., TadA*8) comprising one or more of the following alterations R26C, V88A, A109S, T111R, D119N, H122N, Y147D, F149Y, T166I and/or D167N, relative to TadA*7.10, the TadA reference sequence, or a corresponding mutation in another TadA. In other embodiments, the base editor comprises a heterodimer of a wild-type adenosine deaminase domain and an adenosine deaminase variant domain (e.g., TadA*8) comprising a combination of alterations selected from the group of: R26C+A109S+T111R+D119N+H122N+Y147D+F149Y+T166I+D167N; V88A+A109S+T111R+D119N+H122N+F149Y+T166I +D167N; R26C+A109S+T111R+D119N+H122N+F149Y+T166I+D167N; V88A+T111R+D119N+F149Y; and A109S+T111R+D119N+H122N+Y147D+F149Y+T166I+D167N, relative to TadA*7.10, the TadA reference sequence, or a corresponding mutation in another TadA.

[0483] In other embodiments, the adenosine deaminase variant is a heterodimer of a wild-type adenosine deaminase domain and an adenosine deaminase variant domain (e.g., TadA*7.10) comprising one or more of the following alterations L36H, I76Y, V82G, Y147T, Y147D, F149Y, Q154S, N157K, and/or D167N, relative to TadA*7.10, the TadA reference sequence, or a corresponding mutation in another TadA. In some embodiments, an adenosine deaminase variant is a heterodimer comprising a wild-type adenosine deaminase domain and an adenosine deaminase variant domain (e.g., MSP828) having the following alterations V82G, Y147T/D, Q154S, and one or more of L36H, I76Y, F149Y, N157K, and D167N, relative to TadA*7.10, the TadA reference sequence, or a corresponding mutation in another TadA. In other embodiments, the adenosine deaminase variant is a heterodimer of a wild-type adenosine deaminase domain and an adenosine deaminase variant domain (e.g., TadA*7.10) comprising a combination of alterations selected from the group of: V82G+Y147T+Q154S; I76Y+V82G+Y147T+Q154S; L36H+V82G+Y147T+Q154S+N157K; V82G+Y147D+F149Y+Q154S+D167N; L36H+V82G+Y147D+F149Y+Q154S+N157K+D167N; L36H+I76Y+V82G +Y147T+Q154S+N157K; I76Y+V82G+Y147D+F149Y+Q154S+D167N; L36H+I76Y+V82G+Y147D+F149Y+Q154S+N157K+D167N, relative to TadA*7.10, the TadA reference sequence, or a corresponding mutation in another TadA.

[0484] In other embodiments, the adenosine deaminase variant is a heterodimer of a TadA*7.10 domain and an adenosine deaminase variant domain (e.g., TadA*8) comprising one or more of the following alterations Y147T, Y147R, Q154S, Y123H, V82S, T166R, and/or Q154R, relative to TadA*7.10, the TadA reference sequence, or a corresponding mutation in another TadA. In other embodiments, the adenosine deaminase variant is a heterodimer of a TadA*7.10 domain and an adenosine deaminase variant domain (e.g., TadA*8) comprising a combination of alterations selected from the group of: Y147T+Q154R; Y147T+Q154S; Y147R+Q154S; V82S+Q154S; V82S+Y147R; V82S+Q154R; V82S+Y123H; I76Y+V82S; V82S+Y123H+Y147T; V82S+Y123H+Y147R; V82S+Y123H+Q154R; Y147R+Q154R +Y123H; Y147R+Q154R+I76Y; Y147R+Q154R+T166R; Y123H+Y147R+Q154R+I76Y; V82S+Y123H+Y147R+Q154R; and I76Y+V82S+Y123H+Y147R+Q154R, relative to TadA*7.10, the TadA reference sequence, or a corresponding mutation in another TadA.

[0485] In particular embodiments, an adenosine deaminase heterodimer comprises a TadA*8 domain and an adenosine deaminase domain selected from Staphylococcus aureus (S. aureus) TadA, Bacillus subtilis (B. subtilis) TadA, Salmonella typhimurium (S. typhimurium) TadA, Shewanella putrefaciens (S. putrefaciens) TadA, Haemophilus influenzae F3031 (H. influenzae) TadA, Caulobacter crescentus (C. crescentus) TadA, Geobacter sulfurreducens (G. sulfurreducens) TadA, or TadA*7.10.

[0486] In some embodiments, an adenosine deaminase is a TadA*8. In one embodiment, an adenosine deaminase is a TadA*8 that comprises or consists essentially of the following sequence or a fragment thereof having adenosine deaminase activity:

(SEQ ID NO: 320)
MSEVEFSHEYWMRHALTLAKRARDEREVPVGAVLVLNNRVIGEGWNRAIG
LHDPTAHAEIMALRQGGLVMQNYRLIDATLYVTFEPCVMCAGAMIHSRIG
RVVFGVRNAKTGAAGSLMDVLHYPGMNHRVEITEGILADECAALLCTFFR
MPRQVFNAQKKAQSSTD

[0487] In some embodiments, the TadA*8 is truncated. In some embodiments, the truncated TadA*8 is missing 1, 2, 3, 4, 5, 6, 7, 8, 9, 10, 11, 12, 13, 14, 15, 6, 17, 18, 19, or 20 N-terminal amino acid residues relative to the full length TadA*8. In some embodiments, the truncated TadA*8 is missing 1, 2, 3, 4, 5, 6, 7, 8, 9, 10, 11, 12, 13, 14, 15, 6, 17, 18, 19, or 20 C-terminal amino acid residues relative to the full length TadA*8. In some embodiments the adenosine deaminase variant is a full-length TadA*8.

[0488] In some embodiments the TadA*8 is TadA*8.1, TadA*8.2, TadA*8.3, TadA*8.4, TadA*8.5, TadA*8.6, TadA*8.7, TadA*8.8, TadA*8.9, TadA*8.10, TadA*8.11, TadA*8.12, TadA*8.13, TadA*8.14, TadA*8.15, TadA*8.16, TadA*8.17, TadA*8.18, TadA*8.19, TadA*8.20, TadA*8.21, TadA*8.22, TadA*8.23, or TadA*8.24.

[0489] In other embodiments, a base editor of the disclosure comprising an adenosine deaminase variant (e.g., TadA*8) monomer comprising one or more of the following alterations: R26C, V88A, A109S, T111R, D119N, H122N, Y147D, F149Y, T166I and/or D167N, relative to TadA*7.10, the TadA reference sequence, or a corresponding mutation in another TadA. In other embodiments, the adenosine deaminase variant (TadA*8) monomer comprises a combination of alterations selected from the group of: R26C+A109S+T11R+D119N+H122N+Y147D+F149Y+T166I +D167N; V88A+A109S+T111R+D119N+H122N+F149Y+T166I +D167N; R26C+A109S+T111R+D119N+H122N+F149Y+T166I +D167N; V88A+T111R+D119N+F149Y; and A109S+T111R+D119N+H122N+Y147D +F149Y+T166I+D167N, relative to TadA*7.10, the TadA reference sequence, or a corresponding mutation in another TadA.

[0490] In other embodiments, a base editor comprises a heterodimer of a wild-type adenosine deaminase domain and an adenosine deaminase variant domain (e.g., TadA*8) comprising one or more of the following alterations R26C, V88A, A109S, T111R, D119N, H122N, Y147D, F149Y, T166I and/or D167N, relative to TadA*7.10, the TadA reference sequence, or a corresponding mutation in another TadA. In other embodiments, the base editor comprises a heterodimer of a wild-type adenosine deaminase domain and an adenosine deaminase variant domain (e.g., TadA*8) comprising a combination of alterations selected from the group of: R26C+A109S+T111R+D119N+H122N+Y147D+F149Y+T166I+D167N; V88A+A109S+T111R+D119N+H122N+F149Y+T166I +D167N; R26C+A109S+T111R+D119N+H122N+F149Y+T166I+D167N; V88A+T111R+D119N+F149Y; and A109S+T111R+D119N+H122N+Y147D+F149Y+T166I+D167N, relative to TadA*7.10, the TadA reference sequence, or a corresponding mutation in another TadA.

[0491] In other embodiments, a base editor comprises a heterodimer of a TadA*7.10 domain and an adenosine deaminase variant domain (e.g., TadA*8) comprising one or more of the following alterations R26C, V88A, A109S, T111R, D119N, H122N, Y147D, F149Y, T166I and/or D167N, relative to TadA*7.10, the TadA reference sequence, or a corresponding mutation in another TadA. In other embodiments, the base editor comprises a heterodimer of a TadA*7.10 domain and an adenosine deaminase variant domain (e.g., TadA*8) comprising a combination of alterations selected from the group of: R26C+A109S+T111R+D119N+H122N+Y147D+F149Y+T166I +D167N; V88A+A109S+T111R+D119N+H122N+F149Y+T166I +D167N; R26C+A109S+T111R+D119N+H122N+F149Y+T166I+D167N; V88A+T111R+D119N+F149Y; andA109S+T111R+D119N+H122N+Y147D+F149Y+T166I +D167N, relative to TadA*7.10, the TadA reference sequence, or a corresponding mutation in another TadA.

[0492] In other embodiments, the adenosine deaminase variant is a heterodimer of a TadA*7.10 domain and an adenosine deaminase variant domain (e.g., TadA*7.10) comprising one or more of the following alterations L36H, I76Y, V82G, Y147T, Y147D, F149Y, Q154S, N157K, and/or D167N, relative to TadA*7.10, the TadA reference sequence, or a corresponding mutation in another TadA. In some embodiments, an adenosine deaminase variant is a heterodimer comprising a TadA*7.10 domain and an adenosine deaminase variant domain (e.g., MSP828) having the following alterations V82G, Y147T/D, Q154S, and one or more of L36H, I76Y, F149Y, N157K, and D167N, relative to TadA*7.10, the TadA reference sequence, or a corresponding mutation in another TadA. In other embodiments, the adenosine deaminase variant is a heterodimer of a TadA*7.10 domain and an adenosine deaminase variant domain (e.g., TadA*7.10) comprising a combination of alterations selected from the group of: V82G+Y147T+Q154S; I76Y+V82G+Y147T+Q154S; L36H+V82G+Y147T+Q154S+N157K; V82G+Y147D+F149Y+Q154S+D167N; L36H+V82G+Y147D+F149Y+Q154S+N157K+D167N; L36H+I76Y+V82G+Y147T+Q154S+N157K; I76Y+V82G+Y147D +F149Y+Q154S+D167N; L36H+I76Y+V82G+Y147D+F149Y+Q154S+N157K+D167N, relative to TadA*7.10, the TadA reference sequence, or a corresponding mutation in another TadA.

[0493] In some embodiments, the TadA*8 is a variant as shown in Table 6. Table 6 shows certain amino acid position numbers in the TadA amino acid sequence and the amino acids present in those positions in the TadA-7.10 adenosine deaminase. Table 6 also shows amino acid changes in TadA variants relative to TadA-7.10 following phage-assisted non-continuous evolution (PANCE) and phage-assisted continuous evolution (PACE), as described in M. Richter et al., 2020, Nature Biotechnology, doi.org/10.1038/s41587-020-0453-z, the entire contents of which are incorporated by reference herein. In some embodiments, the TadA*8 is TadA*8a, TadA*8b, TadA*8c, TadA*8d, or TadA*8e. In some embodiments, the TadA*8 is TadA*8e.

TABLE 6
Select TadA*8 Variants

| | | TadA amino acid number | | | | | | | | | |
|---|---|---|---|---|---|---|---|---|---|---|---|
| | TadA | 26 | 88 | 109 | 111 | 119 | 122 | 147 | 149 | 166 | 167 |
| | TadA-7.10 | R | V | A | T | D | H | Y | F | T | D |
| PANCE 1 | | | | | R | | | | | | |
| PANCE 2 | | | | S/T | R | | | | | | |
| PACE | TadA-8a | C | | S | R | N | N | D | Y | I | N |
| | TadA-8b | | A | S | R | N | N | | Y | I | N |
| | TadA-8c | C | | S | R | N | N | | Y | I | N |
| | TadA-8d | | A | | R | N | | | Y | | |
| | TadA-8e | | | S | R | N | N | D | Y | I | N |

[0494] In some embodiments, the TadA variant is a variant as shown in Table 6.1. Table 6.1 shows certain amino acid position numbers in the TadA amino acid sequence and the amino acids present in those positions in the TadA*7.10 adenosine deaminase. In some embodiments, the TadA variant is MSP605, MSP680, MSP823, MSP824, MSP825, MSP827, MSP828, or MSP829. In some embodiments, the TadA variant is MSP828. In some embodiments, the TadA variant is MSP829.

TABLE 6.1
TadA Variants

| | TadA Amino Acid Number | | | | | | | |
|---|---|---|---|---|---|---|---|---|
| Variant | 36 | 76 | 82 | 147 | 149 | 154 | 157 | 167 |
| TadA-7.10 | L | I | V | Y | F | Q | N | D |
| MSP605 | | | G | T | | S | | |
| MSP680 | | Y | G | T | | S | | |
| MSP823 | H | | G | T | | S | K | |
| MSP824 | | | G | D | Y | S | | N |
| MSP825 | H | | G | D | Y | S | K | N |
| MSP827 | H | Y | G | T | | S | K | |
| MSP828 | | Y | G | D | Y | S | | N |
| MSP829 | H | Y | G | D | Y | S | K | N |

[0495] In one embodiment, a fusion protein of the invention comprises a wild-type TadA is linked to an adenosine deaminase variant described herein (e.g., TadA*8), which is linked to Cas9 nickase. In particular embodiments, the fusion proteins comprise a single TadA*8 domain (e.g., provided as a monomer). In other embodiments, the fusion protein comprises TadA*8 and TadA(wt), which are capable of forming heterodimers.

[0496] In some embodiments, the adenosine deaminase comprises an amino acid sequence that is at least 60%, at least 65%, at least 70%, at least 75%, at least 80%, at least 85%, at least 90%, at least 95%, at least 96%, at least 97%, at least 98%, at least 99%, or at least 99.5% identical to any one of the amino acid sequences set forth in any of the adenosine deaminases provided herein. It should be appreciated that adenosine deaminases provided herein may include one or more mutations (e.g., any of the mutations provided herein). The disclosure provides any deaminase domains with a certain percent identity plus any of the mutations or combinations thereof described herein. In some embodiments, the adenosine deaminase comprises an amino acid sequence that has 1, 2, 3, 4, 5, 6, 7, 8, 9, 10, 11, 12, 13, 14, 15, 16, 17, 18, 19, 20, 21, 22, 21, 24, 25, 26, 27, 28, 29, 30, 31, 32, 33, 34, 35, 36, 37, 38, 39, 40, 41, 42, 43, 44, 45, 46, 47, 48, 49, 50, or more mutations compared to a reference sequence, or any of the adenosine deaminases provided herein. In some embodiments, the adenosine deaminase comprises an amino acid sequence that has at least 5, at least 10, at least 15, at least 20, at least 25, at least 30, at least 35, at least 40, at least 45, at least 50, at least 60, at least 70, at least 80, at least 90, at least 100, at least 110, at least 120, at least 130, at least 140, at least 150, at least 160, or at least 170 identical contiguous amino acid residues as compared to any one of the amino acid sequences known in the art or described herein.

[0497] In particular embodiments, a TadA*8 comprises one or more mutations at any of the following positions shown in bold. In other embodiments, a TadA*8 comprises one or more mutations at any of the positions shown with underlining:

| (SEQ ID NO: 4) | |
|---|---|
| MSEVEFSHEY WMRHALTLAK RARDEREVPV GAVLVLNNRV IGEGWNRAIG | 50 |
| LHDPTAHAEI MALRQGGLVM QNYRLIDATL YVTFEPCVMC AGAMIHSRIG | 100 |
| RVVFGVRNAK TGAAGSLMDV LHYPGMNHRV EITEGILADE CAALLCYFFR | 150 |
| MPRQVFNAQK KAQSSTD | |

[0498] For example, the TadA*8 comprises alterations at amino acid position 82 and/or 166 (e.g., V82S, T166R) alone or in combination with any one or more of the following Y147T, Y147R, Q154S, Y123H, and/or Q154R, relative to TadA*7.10, the TadA reference sequence, or a corresponding mutation in another TadA. In particular embodiments, a combination of alterations is selected from the group of: Y147T+Q154R; Y147T+Q154S; Y147R+Q154S; V82S+Q154S; V82S+Y147R; V82S+Q154R; V82S+Y123H; I76Y+V82S; V82S+Y123H+Y147T; V82S+Y123H+Y147R; V82S+Y123H+Q154R; Y147R+Q154R +Y123H; Y147R+Q154R+176Y; Y147R+Q154R+T166R; Y123H+Y147R+Q154R+I76Y; V82S+Y123H+Y147R+Q154R; and I76Y+V82S+Y123H+Y147R+Q154R, relative to TadA*7.10, the TadA reference sequence, or a corresponding mutation in another TadA.

[0499] In some embodiments, the TadA*8 is truncated. In some embodiments, the truncated TadA*8 is missing 1, 2, 3, 4, 5, 6, 7, 8, 9, 10, 11, 12, 13, 14, 15, 6, 17, 18, 19, or 20 N-terminal amino acid residues relative to the full length TadA*8. In some embodiments, the truncated TadA*8 is missing 1, 2, 3, 4, 5, 6, 7, 8, 9, 10, 11, 12, 13, 14, 15, 6, 17, 18, 19, or 20 C-terminal amino acid residues relative to the full length TadA*8. In some embodiments the adenosine deaminase variant is a full-length TadA*8.

[0500] In one embodiment, a fusion protein of the invention comprises a wild-type TadA is linked to an adenosine deaminase variant described herein (e.g., TadA*8), which is linked to Cas9 nickase. In particular embodiments, the fusion proteins comprise a single TadA*8 domain (e.g., provided as a monomer). In other embodiments, the base editor comprises TadA*8 and TadA(wt), which are capable of forming heterodimers.

[0501] In particular embodiments, the fusion proteins comprise a single (e.g., provided as a monomer) TadA*8. In some embodiments, the TadA*8 is linked to a Cas9 nickase. In some embodiments, the fusion proteins of the invention comprise as a heterodimer of a wild-type TadA (TadA(wt)) linked to a TadA*8. In other embodiments, the fusion proteins of the invention comprise as a heterodimer of a TadA*7.10 linked to a TadA*8. In some embodiments, the base editor is ABE8 comprising a TadA*8 variant monomer. In some embodiments, the base editor is ABE8 comprising a heterodimer of a TadA*8 and a TadA(wt). In some embodiments, the base editor is ABE8 comprising a heterodimer of a TadA*8 and TadA*7.10. In some embodiments, the base editor is ABE8 comprising a heterodimer of a TadA*8. In some embodiments, the TadA*8 is selected from Table 6, 12 or 13. In some embodiments, the ABE8 is selected from Table 12, 13 or 15.

[0502] In some embodiments, the adenosine deaminase is a TadA*9 variant. In some embodiments, the adenosine deaminase is a TadA*9 variant selected from the variants described below and with reference to the following sequence (termed TadA*7.10):

(SEQ ID NO: 4)

MSEVEFSHEY WMRHALTLAK RARDEREVPV GAVLVLNNRV
IGEGWNRAIG LHDPTAHAEI MALRQGGLVM QNYRLIDATL
YVTFEPCVMC AGAMIHSRIG RVVFGVRNAK TGAAGSLMDV
LHYPGMNHRV EITEGILADE CAALLCYFFR MPRQVFNAQK
KAQSSTD

[0503] In some embodiments, an adenosine deaminase comprises one or more of the following alterations: R21N, R23H, E25F, N38G, L51W, P54C, M70V, Q71M, N72K, Y73S, V82T, M94V, P124W, T133K, D139L, D139M, C146R, and A158K. The one or more alternations are shown in the sequence above in underlining and bold font.

[0504] In some embodiments, an adenosine deaminase comprises one or more of the following combinations of alterations: V82S+Q154R+Y147R; V82S+Q154R+Y123H; V82S+Q154R+Y147R+Y123H; Q154R+Y147R+Y123H+I76Y+V82S; V82S+I76Y; V82S+Y147R; V82S+Y147R+Y123H; V82S+Q154R+Y123H; Q154R+Y147R+Y123H+I76Y; V82S+Y147R; V82S+Y147R+Y123H; V82S+Q154R+Y123H; V82S+Q154R+Y147R; V82S+Q154R+Y147R; Q154R+Y147R+Y123H+I76Y; Q154R+Y147R+Y123H+I76Y+V82S; I76Y_V82S_Y123H_Y147R_Q154R; Y147R+Q154R+H123H; and V82S+Q154R.

[0505] In some embodiments, an adenosine deaminase comprises one or more of the following combinations of alterations: E25F+V82S+Y123H, T133K+Y147R+Q154R; E25F+V82S +Y123H+Y147R+Q154R; L51W+V82S+Y123H+C146R+Y147R+Q154R; Y73S+V82S+Y123H+Y147R+Q154R; P54C+V82S+Y123H+Y147R+Q154R; N38G+V82T +Y123H+Y147R+Q154R; N72K+V82S+Y123H+D139L+Y147R+Q154R; E25F+V82S+Y123H+D139M+Y147R+Q154R; Q71M+V82S+Y123H+Y147R+Q154R; E25F+V82S+Y123H+T133K+Y147R+Q154R; E25F+V82S+Y123H+Y147R+Q154R; V82S+Y123H+P124W+Y147R+Q154R; L51W+V82S+Y123H+C146R+Y147R+Q154R; P54C+V82S+Y123H+Y147R+Q154R; Y73S+V82S+Y123H+Y147R +Q154R; N38G+V82T+Y123H+Y147R+Q154R; R23H+V82S+Y123H+Y147R+Q154R; R21N+V82S+Y123H+Y147R+Q154R; V82S+Y123H+Y147R+Q154R+A158K; N72K+V82S+Y123H+D139L+Y147R+Q154R; E25F+V82S+Y123H+D139M+Y147R+Q154R; and M70V+V82S+M94V+Y123H+Y147R+Q154R

[0506] In some embodiments, an adenosine deaminase comprises one or more of the following combinations of alterations: Q71M+V82S+Y123H+Y147R+Q154R; E25F+I76Y+V82S +Y123H+Y147R+Q154R; I76Y+V82T+Y123H+Y147R+Q154R; N38G+I76Y+V82S+Y123H+Y147R+Q154R; R23H+I76Y+V82S+Y123H+Y147R+Q154R; P54C +I76Y+V82S+Y123H+Y147R+Q154R; R21N+I76Y+V82S+Y123H+Y147R+Q154R; 176Y+V82S+Y123H+D139M+Y147R+Q154R; Y73S+I76Y+V82S+Y123H +Y147R+Q154R; E25F+I76Y+V82S+Y123H+Y147R+Q154R; I76Y+V82T+Y123H +Y147R+Q154R; N38G+I76Y+V82S+Y123H+Y147R+Q154R; R23H+I76Y+V82S +Y123H+Y147R+Q154R; P54C+I76Y+V82S+Y123H+Y147R+Q154R; R21N+I76Y +V82S+Y123H+Y147R+Q154R; I76Y+V82S+Y123H+D139M+Y147R+Q154R; Y73S+I76Y+V82S+Y123H+Y147R+Q154R; and V82S+Q154R; N72K_V82S+Y123H +Y147R+Q154R; Q71M_V82S+Y123H+Y147R+Q154R; V82S+Y123H+T133K+Y147R+Q154R; V82S+Y123H+T133K+Y147R+Q154R+A158K; M70V+Q71M+N72K+V82S+Y123H+Y147R+Q154R; N72K_V82S+Y123H+Y147R+Q154R; Q71M_V82S+Y123H+Y147R+Q154R; M70V+V82S+M94V+Y123H+Y147R+Q154R; V82S+Y123H+T133K+Y147R+Q154R; V82S+Y123H+T133K+Y147R+Q154R+A158K; and M70V+Q71M+N72K+V82S+Y123H+Y147R+Q154R. In some embodiments, the adenosine deaminase is expressed as a monomer. In other embodiments, the adenosine deaminase is expressed as a heterodimer. In some embodiments, the deaminase or other polypeptide sequence lacks a methionine, for example when included as a component of a fusion protein. This can alter the numbering of positions. However, the skilled person will understand that such corresponding mutations refer to the same mutation, e.g., Y73S and Y72S and D139M and D138M.

[0507] In some embodiments, the TadA*9 variant comprises the alterations described in Table 16 as described herein. In some embodiments, the TadA*9 variant is a monomer. In some embodiments, the TadA*9 variant is a heterodimer with a wild-type TadA adenosine deaminase. In some embodiments, the TadA*9 variant is a heterodimer with another TadA variant (e.g., TadA*8, TadA*9). Additional details of TadA*9 adenosine deaminases are described in International PCT Application No. PCT/2020/049975, which is incorporated herein by reference for its entirety.

[0508] Any of the mutations provided herein and any additional mutations (e.g., based on the ecTadA amino acid sequence) can be introduced into any other adenosine deaminases. Any of the mutations provided herein can be made individually or in any combination in TadA reference sequence or another adenosine deaminase (e.g., ecTadA).

[0509] Details of A to G nucleobase editing proteins are described in International PCT Application No. PCT/2017/045381 (WO2018/027078) and Gaudelli, N. M., et al., “Programmable base editing of A•T to G•C in genomic DNA without DNA cleavage” Nature, 551, 464-471 (2017), the entire contents of which are hereby incorporated by reference.

### C to T Editing

[0510] In some embodiments, a base editor disclosed herein comprises a fusion protein comprising cytidine deaminase capable of deaminating a target cytidine (C) base of a polynucleotide to produce uridine (U), which has the base pairing properties of thymine. In some embodiments, for example where the polynucleotide is double-stranded (e.g., DNA), the uridine base can then be substituted with a thymidine base (e.g., by cellular repair machinery) to give rise to a C:G to a T:A transition. In other embodiments, deamination of a C to U in a nucleic acid by a base editor cannot be accompanied by substitution of the U to a T.

[0511] The deamination of a target C in a polynucleotide to give rise to a U is a non-limiting example of a type of base editing that can be executed by a base editor described herein. In another example, a base editor comprising a cytidine deaminase domain can mediate conversion of a cytosine (C) base to a guanine (G) base. For example, a U of a polynucleotide produced by deamination of a cytidine by a cytidine deaminase domain of a base editor can be excised from the polynucleotide by a base excision repair mechanism (e.g., by a uracil DNA glycosylase (UDG) domain), producing an abasic site. The nucleobase opposite the abasic site can then be substituted (e.g., by base repair machinery) with another base, such as a C, by for example a translesion polymerase. Although it is typical for a nucleobase opposite an abasic site to be replaced with a C, other substitutions (e.g., A, G or T) can also occur.

[0512] Accordingly, in some embodiments a base editor described herein comprises a deamination domain (e.g., cytidine deaminase domain) capable of deaminating a target C to a U in a polynucleotide. Further, as described below, the base editor can comprise additional domains which facilitate conversion of the U resulting from deamination to, in some embodiments, a T or a G. For example, a base editor comprising a cytidine deaminase domain can further comprise a uracil glycosylase inhibitor (UGI) domain to mediate substitution of a U by a T, completing a C-to-T base editing event. In another example, a base editor can incorporate a translesion polymerase to improve the efficiency of C-to-G base editing, since a translesion polymerase can facilitate incorporation of a C opposite an abasic site (i.e., resulting in incorporation of a G at the abasic site, completing the C-to-G base editing event).

[0513] A base editor comprising a cytidine deaminase as a domain can deaminate a target C in any polynucleotide, including DNA, RNA and DNA-RNA hybrids. Typically, a cytidine deaminase catalyzes a C nucleobase that is positioned in the context of a single-stranded portion of a polynucleotide. In some embodiments, the entire polynucleotide comprising a target C can be single-stranded. For example, a cytidine deaminase incorporated into the base editor can deaminate a target C in a single-stranded RNA polynucleotide. In other embodiments, a base editor comprising a cytidine deaminase domain can act on a double-stranded polynucleotide, but the target C can be positioned in a portion of the polynucleotide which at the time of the deamination reaction is in a single-stranded state. For example, in embodiments where the NAGPB domain comprises a Cas9 domain, several nucleotides can be left unpaired during formation of the Cas9-gRNA-target DNA complex, resulting in formation of a Cas9 “R-loop complex”. These unpaired nucleotides can form a bubble of single-stranded DNA that can serve as a substrate for a single-strand specific nucleotide deaminase enzyme (e.g., cytidine deaminase).

[0514] In some embodiments, a cytidine deaminase of a base editor can comprise all or a portion of an apolipoprotein B mRNA editing complex (APOBEC) family deaminase. APOBEC is a family of evolutionarily conserved cytidine deaminases. Members of this family are C-to-U editing enzymes. The N-terminal domain of APOBEC like proteins is the catalytic domain, while the C-terminal domain is a pseudocatalytic domain. More specifically, the catalytic domain is a zinc dependent cytidine deaminase domain and is important for cytidine deamination. APOBEC family members include APOBEC1, APOBEC2, APOBEC3A, APOBEC3B, APOBEC3C, APOBEC3D (“APOBEC3E” now refers to this), APOBEC3F, APOBEC3G, APOBEC3H, APOBEC4, and Activation-induced (cytidine) deaminase. In some embodiments, a deaminase incorporated into a base editor comprises all or a portion of an APOBEC1 deaminase. In some embodiments, a deaminase incorporated into a base editor comprises all or a portion of APOBEC2 deaminase. In some embodiments, a deaminase incorporated into a base editor comprises all or a portion of is an APOBEC3 deaminase. In some embodiments, a deaminase incorporated into a base editor comprises all or a portion of an APOBEC3A deaminase. In some embodiments, a deaminase incorporated into a base editor comprises all or a portion of APOBEC3B deaminase. In some embodiments, a deaminase incorporated into a base editor comprises all or a portion of APOBEC3C deaminase. In some embodiments, a deaminase incorporated into a base editor comprises all or a portion of APOBEC3D deaminase. In some embodiments, a deaminase incorporated into a base editor comprises all or a portion of APOBEC3E deaminase. In some embodiments, a deaminase incorporated into a base editor comprises all or a portion of APOBEC3F deaminase. In some embodiments, a deaminase incorporated into a base editor comprises all or a portion of APOBEC3G deaminase. In some embodiments, a deaminase incorporated into a base editor comprises all or a portion of APOBEC3H deaminase. In some embodiments, a deaminase incorporated into a base editor comprises all or a portion of APOBEC4 deaminase. In some embodiments, a deaminase incorporated into a base editor comprises all or a portion of activation-induced deaminase (AID). In some embodiments a deaminase incorporated into a base editor comprises all or a portion of cytidine deaminase 1 (CDA1). It should be appreciated that a base editor can comprise a deaminase from any suitable organism (e.g., a human or a rat). In some embodiments, a deaminase domain of a base editor is from a human, chimpanzee, gorilla, monkey, cow, dog, rat, or mouse. In some embodiments, the deaminase domain of the base editor is derived from rat (e.g., rat APOBEC1). In some embodiments, the deaminase domain of the base editor is human APOBEC1. In some embodiments, the deaminase domain of the base editor is pmCDA1.

[0515] Other exemplary deaminases that can be fused to Cas9 according to aspects of this disclosure are provided below. In embodiments, the deaminases are activation-induced deaminases (AID). It should be understood that, in some embodiments, the active domain of the respective sequence can be used, e.g., the domain without a localizing signal (nuclear localization sequence, without nuclear export signal, cytoplasmic localizing signal).

[0516] Some aspects of the present disclosure are based on the recognition that modulating the deaminase domain catalytic activity of any of the fusion proteins described herein, for example by making point mutations in the deaminase domain, affect the processivity of the fusion proteins (e.g., base editors). For example, mutations that reduce, but do not eliminate, the catalytic activity of a deaminase domain within a base editing fusion protein can make it less likely that the deaminase domain will catalyze the deamination of a residue adjacent to a target residue, thereby narrowing the deamination window. The ability to narrow the deamination window can prevent unwanted deamination of residues adjacent to specific target residues, which can decrease or prevent off-target effects.

[0517] For example, in some embodiments, an APOBEC deaminase incorporated into a base editor can comprise one or more mutations selected from the group consisting of H121X, H122X, R126X, R126X, R118X, W90X, W90X, and R132X of rAPOBEC1, or one or more corresponding mutations in another APOBEC deaminase, wherein X is any amino acid. In some embodiments, an APOBEC deaminase incorporated into a base editor can comprise one or more mutations selected from the group consisting of H121R, H122R, R126A, R126E, R118A, W90A, W90Y, and R132E of rAPOBEC1, or one or more corresponding mutations in another APOBEC deaminase.

[0518] In some embodiments, an APOBEC deaminase incorporated into a base editor can comprise one or more mutations selected from the group consisting of D316X, D317X, R320X, R320X, R313X, W285X, W285X, R326X of hAPOBEC3G, or one or more corresponding mutations in another APOBEC deaminase, wherein X is any amino acid. In some embodiments, any of the fusion proteins provided herein comprise an APOBEC deaminase comprising one or more mutations selected from the group consisting of D316R, D317R, R320A, R320E, R313A, W285A, W285Y, R326E of hAPOBEC3G, or one or more corresponding mutations in another APOBEC deaminase.

[0519] In some embodiments, an APOBEC deaminase incorporated into a base editor can comprise a H121R and a H122R mutation of rAPOBEC1, or one or more corresponding mutations in another APOBEC deaminase. In some embodiments an APOBEC deaminase incorporated into a base editor can comprise an APOBEC deaminase comprising a R126A mutation of rAPOBEC1, or one or more corresponding mutations in another APOBEC deaminase. In some embodiments, an APOBEC deaminase incorporated into a base editor can comprise an APOBEC deaminase comprising a R126E mutation of rAPOBEC1, or one or more corresponding mutations in another APOBEC deaminase. In some embodiments, an APOBEC deaminase incorporated into a base editor can comprise an APOBEC deaminase comprising a R118A mutation of rAPOBEC1, or one or more corresponding mutations in another APOBEC deaminase. In some embodiments, an APOBEC deaminase incorporated into a base editor can comprise an APOBEC deaminase comprising a W90A mutation of rAPOBEC1, or one or more corresponding mutations in another APOBEC deaminase. In some embodiments, an APOBEC deaminase incorporated into a base editor can comprise an APOBEC deaminase comprising a W90Y mutation of rAPOBEC1, or one or more corresponding mutations in another APOBEC deaminase. In some embodiments, an APOBEC deaminase incorporated into a base editor can comprise an APOBEC deaminase comprising a R132E mutation of rAPOBEC1, or one or more corresponding mutations in another APOBEC deaminase. In some embodiments an APOBEC deaminase incorporated into a base editor can comprise an APOBEC deaminase comprising a W90Y and a R126E mutation of rAPOBEC1, or one or more corresponding mutations in another APOBEC deaminase. In some embodiments, an APOBEC deaminase incorporated into a base editor can comprise an APOBEC deaminase comprising a R126E and a R132E mutation of rAPOBEC1, or one or more corresponding mutations in another APOBEC deaminase. In some embodiments, an APOBEC deaminase incorporated into a base editor can comprise an APOBEC deaminase comprising a W90Y and a R132E mutation of rAPOBEC1, or one or more corresponding mutations in another APOBEC deaminase. In some embodiments, an APOBEC deaminase incorporated into a base editor can comprise an APOBEC deaminase comprising a W90Y, R126E, and R132E mutation of rAPOBEC1, or one or more corresponding mutations in another APOBEC deaminase.

[0520] In some embodiments, an APOBEC deaminase incorporated into a base editor can comprise an APOBEC deaminase comprising a D316R and a D317R mutation of hAPOBEC3G, or one or more corresponding mutations in another APOBEC deaminase. In some embodiments, any of the fusion proteins provided herein comprise an APOBEC deaminase comprising a R320A mutation of hAPOBEC3G, or one or more corresponding mutations in another APOBEC deaminase. In some embodiments, an APOBEC deaminase incorporated into a base editor can comprise an APOBEC deaminase comprising a R320E mutation of hAPOBEC3G, or one or more corresponding mutations in another APOBEC deaminase. In some embodiments, an APOBEC deaminase incorporated into a base editor can comprise an APOBEC deaminase comprising a R313A mutation of hAPOBEC3G, or one or more corresponding mutations in another APOBEC deaminase. In some embodiments, an APOBEC deaminase incorporated into a base editor can comprise an APOBEC deaminase comprising a W285A mutation of hAPOBEC3G, or one or more corresponding mutations in another APOBEC deaminase. In some embodiments, an APOBEC deaminase incorporated into a base editor can comprise an APOBEC deaminase comprising a W285Y mutation of hAPOBEC3G, or one or more corresponding mutations in another APOBEC deaminase. In some embodiments, an APOBEC deaminase incorporated into a base editor can comprise an APOBEC deaminase comprising a R326E mutation of hAPOBEC3G, or one or more corresponding mutations in another APOBEC deaminase. In some embodiments, an APOBEC deaminase incorporated into a base editor can comprise an APOBEC deaminase comprising a W285Y and a R320E mutation of hAPOBEC3G, or one or more corresponding mutations in another APOBEC deaminase. In some embodiments, an APOBEC deaminase incorporated into a base editor can comprise an APOBEC deaminase comprising a R320E and a R326E mutation of hAPOBEC3G, or one or more corresponding mutations in another APOBEC deaminase. In some embodiments, an APOBEC deaminase incorporated into a base editor can comprise an APOBEC deaminase comprising a W285Y and a R326E mutation of hAPOBEC3G, or one or more corresponding mutations in another APOBEC deaminase. In some embodiments, an APOBEC deaminase incorporated into a base editor can comprise an APOBEC deaminase comprising a W285Y, R320E, and R326E mutation of hAPOBEC3G, or one or more corresponding mutations in another APOBEC deaminase.

[0521] A number of modified cytidine deaminases are commercially available, including, but not limited to, SaBE3, SaKKH-BE3, VQR-BE3, EQR-BE3, VRER-BE3, YE1-BE3, EE-BE3, YE2-BE3, and YEE-BE3, which are available from Addgene (plasmids 85169, 85170, 85171, 85172, 85173, 85174, 85175, 85176, 85177). In some embodiments, a deaminase incorporated into a base editor comprises all or a portion of an APOBEC1 deaminase.

[0522] Details of C to T nucleobase editing proteins are described in International PCT Application No. PCT/US2016/058344 (WO2017/070632) and Komor, A. C., et al., “Programmable editing of a target base in genomic DNA without double-stranded DNA cleavage” Nature 533, 420-424 (2016), the entire contents of which are hereby incorporated by reference.

### Cytidine Deaminases

[0523] In some embodiments, the fusion proteins of the invention comprise one or more cytidine deaminase domains. In some embodiments, the cytidine deaminases provided herein are capable of deaminating cytosine or 5-methylcytosine to uracil or thymine. In some embodiments, the cytidine deaminases provided herein are capable of deaminating cytosine in DNA. The cytidine deaminase may be derived from any suitable organism. In some embodiments, the cytidine deaminase is a naturally-occurring cytidine deaminase that includes one or more mutations corresponding to any of the mutations provided herein. One of skill in the art will be able to identify the corresponding residue in any homologous protein, e.g., by sequence alignment and determination of homologous residues. Accordingly, one of skill in the art would be able to generate mutations in any naturally-occurring cytidine deaminase that corresponds to any of the mutations described herein. In some embodiments, the cytidine deaminase is from a prokaryote. In some embodiments, the cytidine deaminase is from a bacterium. In some embodiments, the cytidine deaminase is from a mammal (e.g., human).

[0524] In some embodiments, the cytidine deaminase comprises an amino acid sequence that is at least 60%, at least 65%, at least 70%, at least 75%, at least 80%, at least 85%, at least 90%, at least 95%, at least 96%, at least 97%, at least 98%, at least 99%, or at least 99.5% identical to any one of the cytidine deaminase amino acid sequences set forth herein. It should be appreciated that cytidine deaminases provided herein may include one or more mutations (e.g., any of the mutations provided herein). Some embodiments provide a polynucleotide molecule encoding the cytidine deaminase nucleobase editor polypeptide of any previous aspect or as delineated herein. In some embodiments, the polynucleotide is codon optimized.

[0525] The disclosure provides any deaminase domains with a certain percent identity plus any of the mutations or combinations thereof described herein. In some embodiments, the cytidine deaminase comprises an amino acid sequence that has 1, 2, 3, 4, 5, 6, 7, 8, 9, 10, 11, 12, 13, 14, 15, 16, 17, 18, 19, 20, 21, 22, 21, 24, 25, 26, 27, 28, 29, 30, 31, 32, 33, 34, 35, 36, 37, 38, 39, 40, 41, 42, 43, 44, 45, 46, 47, 48, 49, 50, or more mutations compared to a reference sequence, or any of the cytidine deaminases provided herein. In some embodiments, the cytidine deaminase comprises an amino acid sequence that has at least 5, at least 10, at least 15, at least 20, at least 25, at least 30, at least 35, at least 40, at least 45, at least 50, at least 60, at least 70, at least 80, at least 90, at least 100, at least 110, at least 120, at least 130, at least 140, at least 150, at least 160, or at least 170 identical contiguous amino acid residues as compared to any one of the amino acid sequences known in the art or described herein.

[0526] A fusion protein of the invention second protein comprises two or more nucleic acid editing domains.

### Guide Polynucleotides

[0527] A polynucleotide programmable nucleotide binding domain, when in conjunction with a bound guide polynucleotide (e.g., gRNA), can specifically bind to a target polynucleotide sequence (i.e., via complementary base pairing between bases of the bound guide nucleic acid and bases of the target polynucleotide sequence) and thereby localize the base editor to the target nucleic acid sequence desired to be edited. In some embodiments, the target polynucleotide sequence comprises single-stranded DNA or double-stranded DNA. In some embodiments, the target polynucleotide sequence comprises RNA. In some embodiments, the target polynucleotide sequence comprises a DNA-RNA hybrid.

[0528] CRISPR is an adaptive immune system that provides protection against mobile genetic elements (viruses, transposable elements and conjugative plasmids). CRISPR clusters contain spacers, sequences complementary to antecedent mobile elements, and target invading nucleic acids. CRISPR clusters are transcribed and processed into CRISPR RNA (crRNA). In type II CRISPR systems, correct processing of pre-crRNA requires a trans-encoded small RNA (tracrRNA), endogenous ribonuclease 3 (rnc) and a Cas9 protein. The tracrRNA serves as a guide for ribonuclease 3-aided processing of pre-crRNA. Subsequently, Cas9/crRNA/tracrRNA endonucleolytically cleaves linear or circular dsDNA target complementary to the spacer. The target strand not complementary to crRNA is first cut endonucleolytically, and then trimmed 3′-5′ exonucleolytically. In nature, DNA-binding and cleavage typically requires protein and both RNAs. However, single guide RNAs (“sgRNA”, or simply “gNRA”) can be engineered so as to incorporate aspects of both the crRNA and tracrRNA into a single RNA species. See, e.g., Jinek M., Chylinski K., Fonfara I., Hauer M., Doudna J. A., Charpentier E. Science 337:816-821(2012), the entire contents of which is hereby incorporated by reference. Cas9 recognizes a short motif in the CRISPR repeat sequences (the PAM or protospacer adjacent motif) to help distinguish self versus non-self. See e.g., “Complete genome sequence of an M1 strain of Streptococcus pyogenes.” Ferretti, J. J. et al., Natl. Acad. Sci. U.S.A. 98:4658-4663(2001); “CRISPR RNA maturation by trans-encoded small RNA and host factor RNase III.” Deltcheva E. et al., Nature 471:602-607(2011); and “Programmable dual-RNA-guided DNA endonuclease in adaptive bacterial immunity.” Jinek M.et al, Science 337:816-821(2012), the entire contents of each of which are incorporated herein by reference).

[0529] The PAM sequence can be any PAM sequence known in the art. Suitable PAM sequences include, but are not limited to, NGG, NGA, NGC, NGN, NGT, NGCG, NGAG, NGAN, NGNG, NGCN, NGCG, NGTN, NNGRRT, NNNRRT, NNGRR(N), TTTV, TYCV, TYCV, TATV, NNNNGATT, NNAGAAW, or NAAAAC. Y is a pyrimidine; N is any nucleotide base; W is A or T.

[0530] In an embodiment, a guide polynucleotide described herein can be RNA or DNA. In one embodiment, the guide polynucleotide is a gRNA. An RNA/Cas complex can assist in “guiding” a Cas protein to a target DNA. Cas9/crRNA/tracrRNA endonucleolytically cleaves linear or circular dsDNA target complementary to the spacer. The target strand not complementary to crRNA is first cut endonucleolytically, then trimmed 3′-5′ exonucleolytically. In nature, DNA-binding and cleavage typically requires protein and both RNAs. However, single guide RNAs (“sgRNA”, or simply “gNRA”) can be engineered so as to incorporate aspects of both the crRNA and tracrRNA into a single RNA species. See, e.g., Jinek M. et al., Science 337:816-821(2012), the entire contents of which is hereby incorporated by reference.

[0531] In some embodiments, the guide polynucleotide is at least one single guide RNA (“sgRNA” or “gNRA”). In some embodiments, a guide polynucleotide comprises two or more individual polynucleotides, which can interact with one another via for example complementary base pairing (e.g., a dual guide polynucleotide, dual gRNA). For example, a guide polynucleotide can comprise a CRISPR RNA (crRNA) and a trans-activating CRISPR RNA (tracrRNA) or can comprise one or more trans-activating CRISPR RNA (tracrRNA).

[0532] In some embodiments, the guide polynucleotide is at least one tracrRNA. In some embodiments, the guide polynucleotide does not require PAM sequence to guide the polynucleotide-programmable DNA-binding domain (e.g., Cas9 or Cpf1) to the target nucleotide sequence.

[0533] A guide polynucleotide may include natural or non-natural (or unnatural) nucleotides (e.g., peptide nucleic acid or nucleotide analogs). In some cases, the targeting region of a guide nucleic acid sequence can be at least 15, 16, 17, 18, 19, 20, 21, 22, 23, 24, 25, 26, 27, 28, 29, or 30 nucleotides in length. A targeting region of a guide nucleic acid can be between 10-30 nucleotides in length, or between 15-25 nucleotides in length, or between 15-20 nucleotides in length.

[0534] In some embodiments, the base editor provided herein utilizes one or more guide polynucleotide (e.g., multiple gRNA). In some embodiments, a single guide polynucleotide is utilized for different base editors described herein. For example, a single guide polynucleotide can be utilized for a cytidine base editor and an adenosine base editor.

[0535] In some embodiments, the methods described herein can utilize an engineered Cas protein. A guide RNA (gRNA) is a short synthetic RNA composed of a scaffold sequence necessary for Cas-binding and a user-defined ˜20 nucleotide spacer that defines the genomic target to be modified. Exemplary gRNA scaffold sequences are provided in the sequence listing as SEQ ID NOs: 321-331. Thus, a skilled artisan can change the genomic target of the Cas protein specificity is partially determined by how specific the gRNA targeting sequence is for the genomic target compared to the rest of the genome.

[0536] In other embodiments, a guide polynucleotide can comprise both the polynucleotide targeting portion of the nucleic acid and the scaffold portion of the nucleic acid in a single molecule (i.e., a single-molecule guide nucleic acid). For example, a single-molecule guide polynucleotide can be a single guide RNA (sgRNA or gRNA). Herein the term guide polynucleotide sequence contemplates any single, dual or multi-molecule nucleic acid capable of interacting with and directing a base editor to a target polynucleotide sequence.

[0537] Typically, a guide polynucleotide (e.g., crRNA/trRNA complex or a gRNA) comprises a “polynucleotide-targeting segment” that includes a sequence capable of recognizing and binding to a target polynucleotide sequence, and a “protein-binding segment” that stabilizes the guide polynucleotide within a polynucleotide programmable nucleotide binding domain component of a base editor. In some embodiments, the polynucleotide targeting segment of the guide polynucleotide recognizes and binds to a DNA polynucleotide, thereby facilitating the editing of a base in DNA. In other cases, the polynucleotide targeting segment of the guide polynucleotide recognizes and binds to an RNA polynucleotide, thereby facilitating the editing of a base in RNA. Herein a “segment” refers to a section or region of a molecule, e.g., a contiguous stretch of nucleotides in the guide polynucleotide. A segment can also refer to a region/section of a complex such that a segment can comprise regions of more than one molecule. For example, where a guide polynucleotide comprises multiple nucleic acid molecules, the protein-binding segment of can include all or a portion of multiple separate molecules that are for instance hybridized along a region of complementarity. In some embodiments, a protein-binding segment of a DNA-targeting RNA that comprises two separate molecules can comprise (i) base pairs 40-75 of a first RNA molecule that is 100 base pairs in length; and (ii) base pairs 10-25 of a second RNA molecule that is 50 base pairs in length. The definition of “segment,” unless otherwise specifically defined in a particular context, is not limited to a specific number of total base pairs, is not limited to any particular number of base pairs from a given RNA molecule, is not limited to a particular number of separate molecules within a complex, and can include regions of RNA molecules that are of any total length and can include regions with complementarity to other molecules.

[0538] The guide polynucleotides can be synthesized chemically, synthesized enzymatically, or a combination thereof. For example, the gRNA can be synthesized using standard phosphoramidite-based solid-phase synthesis methods. Alternatively, the gRNA can be synthesized in vitro by operably linking DNA encoding the gRNA to a promoter control sequence that is recognized by a phage RNA polymerase. Examples of suitable phage promoter sequences include T7, T3, SP6 promoter sequences, or variations thereof. In embodiments in which the gRNA comprises two separate molecules (e.g., crRNA and tracrRNA), the crRNA can be chemically synthesized and the tracrRNA can be enzymatically synthesized. A gRNA molecule can be transcribed in vitro.

[0539] A guide polynucleotide may be expressed, for example, by a DNA that encodes the gRNA, e.g., a DNA vector comprising a sequence encoding the gRNA. The gRNA may be encoded alone or together with an encoded base editor. Such DNA sequences may be introduced into an expression system, e.g., a cell, together or separately. For example, DNA sequences encoding a polynucleotide programmable nucleotide binding domain and a gRNA may be introduced into a cell, each DNA sequence can be part of a separate molecule (e.g., one vector containing the polynucleotide programmable nucleotide binding domain coding sequence and a second vector containing the gRNA coding sequence) or both can be part of a same molecule (e.g., one vector containing coding (and regulatory) sequence for both the polynucleotide programmable nucleotide binding domain and the gRNA). An RNA can be transcribed from a synthetic DNA molecule, e.g., a gBlocks® gene fragment.

[0540] A gRNA or a guide polynucleotide can comprise three regions: a first region at the 5′ end that can be complementary to a target site in a chromosomal sequence, a second internal region that can form a stem loop structure, and a third 3′ region that can be single-stranded. A first region of each gRNA can also be different such that each gRNA guides a fusion protein to a specific target site. Further, second and third regions of each gRNA can be identical in all gRNAs.

[0541] A first region of a gRNA or a guide polynucleotide can be complementary to sequence at a target site in a chromosomal sequence such that the first region of the gRNA can base pair with the target site. In some cases, a first region of a gRNA can comprise from or from about 10 nucleotides to 25 nucleotides (i.e., from 10 nucleotides to nucleotides; or from about 10 nucleotides to about 25 nucleotides; or from 10 nucleotides to about 25 nucleotides; or from about 10 nucleotides to 25 nucleotides) or more. For example, a region of base pairing between a first region of a gRNA and a target site in a chromosomal sequence can be or can be about 10, 11, 12, 13, 14, 15, 16, 17, 18, 19, 20, 22, 23, 24, 25, or more nucleotides in length. Sometimes, a first region of a gRNA can be or can be about 19, 20, or 21 nucleotides in length.

[0542] A gRNA or a guide polynucleotide can also comprise a second region that forms a secondary structure. For example, a secondary structure formed by a gRNA can comprise a stem (or hairpin) and a loop. A length of a loop and a stem can vary. For example, a loop can range from or from about 3 to 10 nucleotides in length, and a stem can range from or from about 6 to 20 base pairs in length. A stem can comprise one or more bulges of 1 to 10 or about 10 nucleotides. The overall length of a second region can range from or from about 16 to 60 nucleotides in length. For example, a loop can be or can be about 4 nucleotides in length and a stem can be or can be about 12 base pairs.

[0543] A gRNA or a guide polynucleotide can also comprise a third region at the 3′ end that can be essentially single-stranded. For example, a third region is sometimes not complementarity to any chromosomal sequence in a cell of interest and is sometimes not complementarity to the rest of a gRNA. Further, the length of a third region can vary. A third region can be more than or more than about 4 nucleotides in length. For example, the length of a third region can range from or from about 5 to 60 nucleotides in length.

[0544] A gRNA or a guide polynucleotide can target any exon or intron of a gene target. In some cases, a guide can target exon 1 or 2 of a gene, in other cases; a guide can target exon 3 or 4 of a gene. In some embodiments, a composition comprises multiple gRNAs that all target the same exon or multiple gRNAs that target different exons. An exon and/or an intron of a gene can be targeted.

[0545] A gRNA or a guide polynucleotide can target a nucleic acid sequence of about 20 nucleotides or less than about 20 nucleotides (e.g., at least about 5, 10, 15, 16, 17, 18, 19, 20, 21, 22, 23, 24, 25, 30 nucleotides), or anywhere between about 1-100 nucleotides (e.g., 5, 10, 15, 16, 17, 18, 19, 20, 21, 22, 23, 24, 25, 30, 40, 50, 60, 70, 80, 90, 100). A target nucleic acid sequence can be or can be about 20 bases immediately 5′ of the first nucleotide of the PAM. A gRNA can target a nucleic acid sequence. A target nucleic acid can be at least or at least about 1-10, 1-20, 1-30, 1-40, 1-50, 1-60, 1-70, 1-80, 1-90, or 1-100 nucleotides.

[0546] Methods for selecting, designing, and validating guide polynucleotides, e.g., gRNAs and targeting sequences are described herein and known to those skilled in the art. For example, to minimize the impact of potential substrate promiscuity of a deaminase domain in the nucleobase editor system (e.g., an AID domain), the number of residues that could unintentionally be targeted for deamination (e.g., off-target C residues that could potentially reside on single strand DNA within the target nucleic acid locus) may be minimized. In addition, software tools can be used to optimize the gRNAs corresponding to a target nucleic acid sequence, e.g., to minimize total off-target activity across the genome. For example, for each possible targeting domain choice using S. pyogenes Cas9, all off-target sequences (preceding selected PAMs, e.g., NAG or NGG) may be identified across the genome that contain up to certain number (e.g., 1, 2, 3, 4, 5, 6, 7, 8, 9, or 10) of mismatched base-pairs. First regions of gRNAs complementary to a target site can be identified, and all first regions (e.g., crRNAs) can be ranked according to its total predicted off-target score; the top-ranked targeting domains represent those that are likely to have the greatest on-target and the least off-target activity. Candidate targeting gRNAs can be functionally evaluated by using methods known in the art and/or as set forth herein.

[0547] As a non-limiting example, target DNA hybridizing sequences in crRNAs of a gRNA for use with Cas9s may be identified using a DNA sequence searching algorithm. gRNA design is carried out using custom gRNA design software based on the public tool cas-offinder as described in Bae S., Park J., & Kim J.-S. Cas-OFFinder: A fast and versatile algorithm that searches for potential off-target sites of Cas9 RNA-guided endonucleases. Bioinformatics 30, 1473-1475 (2014). This software scores guides after calculating their genome-wide off-target propensity. Typically matches ranging from perfect matches to 7 mismatches are considered for guides ranging in length from 17 to 24. Once the off-target sites are computationally-determined, an aggregate score is calculated for each guide and summarized in a tabular output using a web-interface. In addition to identifying potential target sites adjacent to PAM sequences, the software also identifies all PAM adjacent sequences that differ by 1, 2, 3 or more than 3 nucleotides from the selected target sites. Genomic DNA sequences for a target nucleic acid sequence, e.g., a target gene may be obtained and repeat elements may be screened using publicly available tools, for example, the RepeatMasker program. RepeatMasker searches input DNA sequences for repeated elements and regions of low complexity. The output is a detailed annotation of the repeats present in a given query sequence.

[0548] Following identification, first regions of gRNAs, e.g., crRNAs, are ranked into tiers based on their distance to the target site, their orthogonality and presence of 5′ nucleotides for close matches with relevant PAM sequences (for example, a 5′ G based on identification of close matches in the human genome containing a relevant PAM e.g., NGG PAM for S. pyogenes, NNGRRT or NNGRRV PAM for S. aureus). As used herein, orthogonality refers to the number of sequences in the human genome that contain a minimum number of mismatches to the target sequence. A “high level of orthogonality” or “good orthogonality” may, for example, refer to 20-mer targeting domains that have no identical sequences in the human genome besides the intended target, nor any sequences that contain one or two mismatches in the target sequence. Targeting domains with good orthogonality may be selected to minimize off-target DNA cleavage.

[0549] A gRNA can then be introduced into a cell or embryo as an RNA molecule or a non-RNA nucleic acid molecule, e.g., DNA molecule. In one embodiment, a DNA encoding a gRNA is operably linked to promoter control sequence for expression of the gRNA in a cell or embryo of interest. A RNA coding sequence can be operably linked to a promoter sequence that is recognized by RNA polymerase III (Pol III). Plasmid vectors that can be used to express gRNA include, but are not limited to, px330 vectors and px333 vectors. In some cases, a plasmid vector (e.g., px333 vector) can comprise at least two gRNA-encoding DNA sequences. Further, a vector can comprise additional expression control sequences (e.g., enhancer sequences, Kozak sequences, polyadenylation sequences, transcriptional termination sequences, etc.), selectable marker sequences (e.g., GFP or antibiotic resistance genes such as puromycin), origins of replication, and the like. A DNA molecule encoding a gRNA can also be linear. A DNA molecule encoding a gRNA or a guide polynucleotide can also be circular.

[0550] In some embodiments, a reporter system is used for detecting base-editing activity and testing candidate guide polynucleotides. In some embodiments, a reporter system comprises a reporter gene based assay where base editing activity leads to expression of the reporter gene. For example, a reporter system may include a reporter gene comprising a deactivated start codon, e.g., a mutation on the template strand from 3′-TAC-5′ to 3′-CAC-5′. Upon successful deamination of the target C, the corresponding mRNA will be transcribed as 5′-AUG-3′ instead of 5′-GUG-3′, enabling the translation of the reporter gene. Suitable reporter genes will be apparent to those of skill in the art. Non-limiting examples of reporter genes include gene encoding green fluorescence protein (GFP), red fluorescence protein (RFP), luciferase, secreted alkaline phosphatase (SEAP), or any other gene whose expression are detectable and apparent to those skilled in the art. The reporter system can be used to test many different gRNAs, e.g., in order to determine which residue(s) with respect to the target DNA sequence the respective deaminase will target. sgRNAs that target non-template strand can also be tested in order to assess off-target effects of a specific base editing protein, e.g., a Cas9 deaminase fusion protein. In some embodiments, such gRNAs can be designed such that the mutated start codon will not be base-paired with the gRNA. The guide polynucleotides can comprise standard ribonucleotides, modified ribonucleotides (e.g., pseudouridine), ribonucleotide isomers, and/or ribonucleotide analogs. In some embodiments, the guide polynucleotide can comprise at least one detectable label. The detectable label can be a fluorophore (e.g., FAM, TMR, Cy3, Cy5, Texas Red, Oregon Green, Alexa Fluors, Halo tags, or suitable fluorescent dye), a detection tag (e.g., biotin, digoxigenin, and the like), quantum dots, or gold particles.

[0551] In some embodiments, a base editor system may comprise multiple guide polynucleotides, e.g., gRNAs. For example, the gRNAs may target to one or more target loci (e.g., at least 1 gRNA, at least 2 gRNA, at least 5 gRNA, at least 10 gRNA, at least 20 gRNA, at least 30 g RNA, at least 50 gRNA) comprised in a base editor system. The multiple gRNA sequences can be tandemly arranged and are preferably separated by a direct repeat.

### Modified Polynucleotides

[0552] To enhance expression, stability, and/or genomic/base editing efficiency, and/or reduce possible toxicity, the base editor-coding sequence (e.g., mRNA) and/or the guide polynucleotide (e.g., gRNA) can be modified to include one or more modified nucleotides and/or chemical modifications, e.g. using pseudo-uridine, 5-Methyl-cytosine, 2′-O-methyl-3′-phosphonoacetate, 2′-O-methyl thioPACE (MSP), 2′-O-methyl-PACE (MP), 2′-fluoro RNA (2′-F-RNA), =constrained ethyl (S-cEt), 2′-O-methyl (‘M’), 2′-O-methyl-3′-phosphorothioate (‘MS’), 2′-O-methyl-3′-thiophosphonoacetate (‘MSP’), 5-methoxyuridine, phosphorothioate, and N1-Methylpseudouridine. Chemically protected gRNAs can enhance stability and editing efficiency in vivo and ex vivo. Methods for using chemically modified mRNAs and guide RNAs are known in the art and described, for example, by Jiang et al., Chemical modifications of adenine base editor mRNA and guide RNA expand its application scope. Nat Commun 11, 1979 (2020). doi.org/10.1038/s41467-020-15892-8, Callum et al., N1-Methylpseudouridine substitution enhances the performance of synthetic mRNA switches in cells, Nucleic Acids Research, Volume 48, Issue 6, 6 Apr. 2020, Page e35, and Andries et al., Journal of Controlled Release, Volume 217, 10 Nov. 2015, Pages 337-344, each of which is incorporated herein by reference in its entirety.

[0553] In a particular embodiment, the chemical modifications are 2′-O-methyl (2′-OMe) modifications. The modified guide RNAs may improve saCas9 efficacy and also specificity. The effect of an individual modification varies based on the position and combination of chemical modifications used as well as the inter- and intramolecular interactions with other modified nucleotides. By way of example, S-cEt has been used to improve oligonucleotide intramolecular folding.

[0554] In some embodiments, the guide polynucleotide comprises one or more modified nucleotides at the 5′ end and/or the 3′ end of the guide. In some embodiments, the guide polynucleotide comprises two, three, four or more modified nucleosides at the 5′ end and/or the 3′ end of the guide. In some embodiments, the guide polynucleotide comprises two, three, four or more modified nucleosides at the 5′ end and/or the 3′ end of the guide. In some embodiments, the guide polynucleotide comprises four modified nucleosides at the 5′ end and four modified nucleosides at the 3′ end of the guide. In some embodiments, the modified nucleoside comprises a 2′ O-methyl or a phosphorothioate.

[0555] In some embodiments, the guide comprises at least about 50%-75% modified nucleotides. In some embodiments, the guide comprises at least about 85% or more modified nucleotides. In some embodiments, at least about 1-5 nucleotides at the 5′ end of the gRNA are modified and at least about 1-5 nucleotides at the 3′ end of the gRNA are modified. In some embodiments, at least about 3-5 contiguous nucleotides at each of the 5′ and 3′ termini of the gRNA are modified. In some embodiments, at least about 20% of the nucleotides present in a direct repeat or anti-direct repeat are modified. In some embodiments, at least about 50% of the nucleotides present in a direct repeat or anti-direct repeat are modified. In some embodiments, at least about 50-75% of the nucleotides present in a direct repeat or anti-direct repeat are modified. In some embodiments, at least about 100 of the nucleotides present in a direct repeat or anti-direct repeat are modified. In some embodiments, at least about 20% or more of the nucleotides present in a hairpin present in the gRNA scaffold are modified. In some embodiments, at least about 50% or more of the nucleotides present in a hairpin present in the gRNA scaffold are modified. In some embodiments, the guide comprises a variable length spacer. In some embodiments, the guide comprises a 20-40 nucleotide spacer. In some embodiments, the guide comprises a spacer comprising at least about 20-25 nucleotides or at least about 30-35 nucleotides. In some embodiments, the spacer comprises modified nucleotides. In some embodiments, the guide comprises two or more of the following:
[0556] at least about 1-5 nucleotides at the 5′ end of the gRNA are modified and at least about 1-5 nucleotides at the 3′ end of the gRNA are modified;
[0557] at least about 20% of the nucleotides present in a direct repeat or anti-direct repeat are modified;
[0558] at least about 50-75% of the nucleotides present in a direct repeat or anti-direct repeat are modified;
[0559] at least about 20% or more of the nucleotides present in a hairpin present in the gRNA scaffold are modified;
[0560] a variable length spacer; and
[0561] a spacer comprising modified nucleotides.

[0562] In embodiments, the gRNA contains numerous modified nucleotides and/or chemical modifications (“heavy mods”). Such heavy mods can increase base editing ˜2 fold in vivo or in vitro. For such modifications, mN=2′-OMe; Ns=phosphorothioate (PS), where “N” represents the any nucleotide, as would be understood by one having skill in the art. In some cases, a nucleotide (N) may contain two modifications, for example, both a 2′-OMe and a PS modification. For example, a nucleotide with a phosphorothioate and 2′ OMe is denoted as “mNs;” when there are two modifications next to each other, the notation is “mNsmNs.

[0563] In some embodiments of the modified gRNA, the gRNA comprises one or more chemical modifications selected from the group consisting of 2′-O-methyl (2′-OMe), phosphorothioate (PS), 2′-O-methyl thioPACE (MSP), 2′-O-methyl-PACE (MP), 2′-O-methyl thioPACE (MSP), 2′-fluoro RNA (2′-F-RNA), and constrained ethyl (S-cEt). In embodiments, the gRNA comprises 2′-O-methyl or phosphorothioate modifications. In an embodiment, the gRNA comprises 2′-O-methyl and phosphorothioate modifications. In an embodiment, the modifications increase base editing by at least about 2 fold.

[0564] A guide polynucleotide can comprise one or more modifications to provide a nucleic acid with a new or enhanced feature. A guide polynucleotide can comprise a nucleic acid affinity tag. A guide polynucleotide can comprise synthetic nucleotide, synthetic nucleotide analog, nucleotide derivatives, and/or modified nucleotides.

[0565] In some cases, a gRNA or a guide polynucleotide can comprise modifications. A modification can be made at any location of a gRNA or a guide polynucleotide. More than one modification can be made to a single gRNA or a guide polynucleotide. A gRNA or a guide polynucleotide can undergo quality control after a modification. In some cases, quality control can include PAGE, HPLC, MS, or any combination thereof.

[0566] A modification of a gRNA or a guide polynucleotide can be a substitution, insertion, deletion, chemical modification, physical modification, stabilization, purification, or any combination thereof.

[0567] A gRNA or a guide polynucleotide can also be modified by 5′ adenylate, 5′ guanosine-triphosphate cap, 5′ N7-Methylguanosine-triphosphate cap, 5′ triphosphate cap, 3′ phosphate, 3′ thiophosphate, 5′ phosphate, 5′ thiophosphate, Cis-Syn thymidine dimer, trimers, C12 spacer, C3 spacer, C6 spacer, dSpacer, PC spacer, rSpacer, Spacer 18, Spacer 9, 3′-3′ modifications, 2′-O-methyl thioPACE (MSP), 2′-O-methyl-PACE (MP), and constrained ethyl (S-cEt), 5′-5′ modifications, abasic, acridine, azobenzene, biotin, biotin BB, biotin TEG, cholesteryl TEG, desthiobiotin TEG, DNP TEG, DNP-X, DOTA, dT-Biotin, dual biotin, PC biotin, psoralen C2, psoralen C6, TINA, 3′ DABCYL, black hole quencher 1, black hole quencer 2, DABCYL SE, dT-DABCYL, IRDye QC-1, QSY-21, QSY-35, QSY-7, QSY-9, carboxyl linker, thiol linkers, 2′-deoxyribonucleoside analog purine, 2′-deoxyribonucleoside analog pyrimidine, ribonucleoside analog, 2′-O-methyl ribonucleoside analog, sugar modified analogs, wobble/universal bases, fluorescent dye label, 2′-fluoro RNA, 2′-O-methyl RNA, methylphosphonate, phosphodiester DNA, phosphodiester RNA, phosphothioate DNA, phosphorothioate RNA, UNA, pseudouridine-5′-triphosphate, 5′-methylcytidine-5′-triphosphate, or any combination thereof.

[0568] In some cases, a modification is permanent. In other cases, a modification is transient. In some cases, multiple modifications are made to a gRNA or a guide polynucleotide. A gRNA or a guide polynucleotide modification can alter physiochemical properties of a nucleotide, such as their conformation, polarity, hydrophobicity, chemical reactivity, base-pairing interactions, or any combination thereof.

[0569] A guide polynucleotide can be transferred into a cell by transfecting the cell with an isolated gRNA or a plasmid DNA comprising a sequence coding for the guide RNA and a promoter. A gRNA or a guide polynucleotide can also be transferred into a cell in other way, such as using virus-mediated gene delivery. A gRNA or a guide polynucleotide can be isolated. For example, a gRNA can be transfected in the form of an isolated RNA into a cell or organism. A gRNA can be prepared by in vitro transcription using any in vitro transcription system known in the art. A gRNA can be transferred to a cell in the form of isolated RNA rather than in the form of plasmid comprising encoding sequence for a gRNA.

[0570] A modification can also be a phosphorothioate substitute. In some cases, a natural phosphodiester bond can be susceptible to rapid degradation by cellular nucleases and; a modification of internucleotide linkage using phosphorothioate (PS) bond substitutes can be more stable towards hydrolysis by cellular degradation. A modification can increase stability in a gRNA or a guide polynucleotide. A modification can also enhance biological activity. In some cases, a phosphorothioate enhanced RNA gRNA can inhibit RNase A, RNase T1, calf serum nucleases, or any combinations thereof. These properties can allow the use of PS-RNA gRNAs to be used in applications where exposure to nucleases is of high probability in vivo or in vitro. For example, phosphorothioate (PS) bonds can be introduced between the last 3-5 nucleotides at the 5′- or 3′-end of a gRNA which can inhibit exonuclease degradation. In some cases, phosphorothioate bonds can be added throughout an entire gRNA to reduce attack by endonucleases.

[0571] In some embodiments, the guide RNA is designed to disrupt a splice site (i.e., a splice acceptor (SA) or a splice donor (SD). In some embodiments, the guide RNA is designed such that the base editing results in a premature STOP codon.

### Protospacer Adjacent Motif

[0572] The term “protospacer adjacent motif (PAM)” or PAM-like motif refers to a 2-6 base pair DNA sequence immediately following the DNA sequence targeted by the Cas9 nuclease in the CRISPR bacterial adaptive immune system. In some embodiments, the PAM can be a 5′ PAM (i.e., located upstream of the 5′ end of the protospacer). In other embodiments, the PAM can be a 3′ PAM (i.e., located downstream of the 5′ end of the protospacer). The PAM sequence is essential for target binding, but the exact sequence depends on a type of Cas protein. The PAM sequence can be any PAM sequence known in the art. Suitable PAM sequences include, but are not limited to, NGG, NGA, NGC, NGN, NGT, NGTT, NGCG, NGAG, NGAN, NGNG, NGCN, NGCG, NGTN, NNGRRT, NNNRRT, NNGRR(N), TTTV, TYCV, TYCV, TATV, NNNNGATT, NNAGAAW, or NAAAAC. Y is a pyrimidine; N is any nucleotide base; W is A or T.

[0573] A base editor provided herein can comprise a CRISPR protein-derived domain that is capable of binding a nucleotide sequence that contains a canonical or non-canonical protospacer adjacent motif (PAM) sequence. A PAM site is a nucleotide sequence in proximity to a target polynucleotide sequence. Some aspects of the disclosure provide for base editors comprising all or a portion of CRISPR proteins that have different PAM specificities.

[0574] For example, typically Cas9 proteins, such as Cas9 from S. pyogenes (spCas9), require a canonical NGG PAM sequence to bind a particular nucleic acid region, where the “N” in “NGG” is adenine (A), thymine (T), guanine (G), or cytosine (C), and the G is guanine. A PAM can be CRISPR protein-specific and can be different between different base editors comprising different CRISPR protein-derived domains. A PAM can be 5′ or 3′ of a target sequence. A PAM can be upstream or downstream of a target sequence. A PAM can be 1, 2, 3, 4, 5, 6, 7, 8, 9, 10 or more nucleotides in length. Often, a PAM is between 2-6 nucleotides in length.

[0575] In some embodiments, the PAM is an “NRN” PAM where the “N” in “NRN” is adenine (A), thymine (T), guanine (G), or cytosine (C), and the R is adenine (A) or guanine (G); or the PAM is an “NYN” PAM, wherein the “N” in NYN is adenine (A), thymine (T), guanine (G), or cytosine (C), and the Y is cytidine (C) or thymine (T), for example, as described in R. T. Walton et al., 2020, Science, 10.1126/science.aba8853 (2020), the entire contents of which are incorporated herein by reference.

[0576] Several PAM variants are described in Table 7 below.

TABLE 7
Cas9 proteins and corresponding PAM sequences

| Variant | PAM |
|---|---|
| spCas9 | NGG |
| spCas9-VRQR | NGA |
| spCas9-VRER | NGCG |
| xCas9 (sp) | NGN |
| saCas9 | NNGRRT |
| saCas9-KKH | NNNRRT |
| spCas9-MQKSER | NGCG |
| spCas9-MQKSER | NGCN |
| spCas9-LRKIQK | NGTN |
| spCas9-LRVSQK | NGTN |
| spCas9-LRVSQL | NGTN |
| spCas9-MQKFRAER | NGC |
| Cpf1 | 5′ (TTTV) |
| SpyMac | 5′-NAA-3′ |

[0577] In some embodiments, the PAM is NGC. In some embodiments, the NGC PAM is recognized by a Cas9 variant. In some embodiments, the NGC PAM variant includes one or more amino acid substitutions selected from D1135M, S1136Q, G1218K, E1219F, A1322R, D1332A, R1335E, and T1337R (collectively termed “MQKFRAER”).

[0578] In some embodiments, the PAM is NGT. In some embodiments, the NGT PAM is recognized by a Cas9 variant. In some embodiments, the NGT PAM variant is generated through targeted mutations at one or more residues 1335, 1337, 1135, 1136, 1218, and/or 1219. In some embodiments, the NGT PAM variant is created through targeted mutations at one or more residues 1219, 1335, 1337, 1218. In some embodiments, the NGT PAM variant is created through targeted mutations at one or more residues 1135, 1136, 1218, 1219, and 1335. In some embodiments, the NGT PAM variant is selected from the set of targeted mutations provided in Tables 8A and 8B below.

TABLE 8A
NGT PAM Variant Mutations at residues 1219, 1335, 1337, 1218

| Variant | E1219V | R1335Q | T1337 | G1218 |
|---|---|---|---|---|
| 1 | F | V | T | |
| 2 | F | V | R | |
| 3 | F | V | Q | |
| 4 | F | V | L | |
| 5 | F | V | T | R |
| 6 | F | V | R | R |
| 7 | F | V | Q | R |
| 8 | F | V | L | R |
| 9 | L | L | T | |
| 10 | L | L | R | |
| 11 | L | L | Q | |
| 12 | L | L | L | |
| 13 | F | I | T | |
| 14 | F | I | R | |
| 15 | F | I | Q | |
| 16 | F | I | L | |
| 17 | F | G | C | |
| 18 | H | L | N | |
| 19 | F | G | C | A |
| 20 | H | L | N | V |
| 21 | L | A | W | |
| 22 | L | A | F | |
| 23 | L | A | Y | |
| 24 | I | A | W | |
| 25 | I | A | F | |
| 26 | I | A | Y | |

TABLE 8B
NGT PAM Variant Mutations at residues
1135, 1136, 1218, 1219, and 1335

| Variant | D1135L | S1136R | G1218S | E1219V | R1335Q |
|---|---|---|---|---|---|
| 27 | G | | | | |
| 28 | V | | | | |
| 29 | I | | | | |
| 30 | | A | | | |
| 31 | | W | | | |
| 32 | | H | | | |
| 33 | | K | | | |
| 34 | | | K | | |
| 35 | | | R | | |
| 36 | | | Q | | |
| 37 | | | T | | |
| 38 | | | N | | |
| 39 | | | | I | |
| 40 | | | | A | |
| 41 | | | | N | |
| 42 | | | | Q | |
| 43 | | | | G | |
| 44 | | | | L | |
| 45 | | | | S | |
| 46 | | | | T | |
| 47 | | | | | L |
| 48 | | | | | I |
| 49 | | | | | V |
| 50 | | | | | N |
| 51 | | | | | S |
| 52 | | | | | T |
| 53 | | | | | F |
| 54 | | | | | Y |
| 55 | N1286Q | I1331F | | | |

[0579] In some embodiments, the NGT PAM variant is selected from variant 5, 7, 28, 31, or 36 in Table 8A and Table 8B. In some embodiments, the variants have improved NGT PAM recognition.

[0580] In some embodiments, the NGT PAM variants have mutations at residues 1219, 1335, 1337, and/or 1218. In some embodiments, the NGT PAM variant is selected with mutations for improved recognition from the variants provided in Table 9 below.

TABLE 9
NGT PAM Variant Mutations at residues
1219, 1335, 1337, and 1218

| Variant | E1219V | R1335Q | T1337 | G1218 |
|---|---|---|---|---|
| 1 | F | V | T | |
| 2 | F | V | R | |
| 3 | F | V | Q | |
| 4 | F | V | L | |
| 5 | F | V | T | R |
| 6 | F | V | R | R |
| 7 | F | V | Q | R |
| 8 | F | V | L | R |

[0581] In some embodiments, the NGT PAM is selected from the variants provided in Table 10 below.

TABLE 10
NGT PAM variants

| | NGTN | | | | | | | |
|---|---|---|---|---|---|---|---|---|
| | variant | D1135 | S1136 | G1218 | E1219 | A1322R | R1335 | T1337 |
| Variant 1 | LRKIQK | L | R | K | I | — | Q | K |
| Variant 2 | LRSVQK | L | R | S | V | — | Q | K |
| Variant 3 | LRSVQL | L | R | S | V | — | Q | L |
| Variant 4 | LRKIRQK | L | R | K | I | R | Q | K |
| Variant 5 | LRSVRQK | L | R | S | V | R | Q | K |
| Variant 6 | LRSVRQL | L | R | S | V | R | Q | L |

[0582] In some embodiments the NGTN variant is variant 1. In some embodiments, the NGTN variant is variant 2. In some embodiments, the NGTN variant is variant 3. In some embodiments, the NGTN variant is variant 4. In some embodiments, the NGTN variant is variant 5. In some embodiments, the NGTN variant is variant 6.

[0583] In some embodiments, the Cas9 domain is a Cas9 domain from Streptococcus pyogenes (SpCas9). In some embodiments, the SpCas9 domain is a nuclease active SpCas9, a nuclease inactive SpCas9 (SpCas9d), or a SpCas9 nickase (SpCas9n). In some embodiments, the SpCas9 comprises a D9X mutation, or a corresponding mutation in any of the amino acid sequences provided herein, wherein X is any amino acid except for D. In some embodiments, the SpCas9 comprises a D9A mutation, or a corresponding mutation in any of the amino acid sequences provided herein. In some embodiments, the SpCas9 domain, the SpCas9d domain, or the SpCas9n domain can bind to a nucleic acid sequence having a non-canonical PAM. In some embodiments, the SpCas9 domain, the SpCas9d domain, or the SpCas9n domain can bind to a nucleic acid sequence having an NGG, a NGA, or a NGCG PAM sequence.

[0584] In some embodiments, the SpCas9 domain comprises one or more of a D1135X, a R1335X, and a T1337X mutation, or a corresponding mutation in any of the amino acid sequences provided herein, wherein X is any amino acid. In some embodiments, the SpCas9 domain comprises one or more of a D1135E, R1335Q, and T1337R mutation, or a corresponding mutation in any of the amino acid sequences provided herein. In some embodiments, the SpCas9 domain comprises a D1135E, a R1335Q, and a T1337R mutation, or corresponding mutations in any of the amino acid sequences provided herein. In some embodiments, the SpCas9 domain comprises one or more of a D1135X, a R1335X, and a T1337X mutation, or a corresponding mutation in any of the amino acid sequences provided herein, wherein X is any amino acid. In some embodiments, the SpCas9 domain comprises one or more of a D1135V, a R1335Q, and a T1337R mutation, or a corresponding mutation in any of the amino acid sequences provided herein. In some embodiments, the SpCas9 domain comprises a D1135V, a R1335Q, and a T1337R mutation, or corresponding mutations in any of the amino acid sequences provided herein. In some embodiments, the SpCas9 domain comprises one or more of a D1135X, a G1218X, a R1335X, and a T1337X mutation, or a corresponding mutation in any of the amino acid sequences provided herein, wherein X is any amino acid. In some embodiments, the SpCas9 domain comprises one or more of a D1135V, a G1218R, a R1335Q, and a T1337R mutation, or a corresponding mutation in any of the amino acid sequences provided herein. In some embodiments, the SpCas9 domain comprises a D1135V, a G1218R, a R1335Q, and a T1337R mutation, or corresponding mutations in any of the amino acid sequences provided herein.

[0585] In some examples, a PAM recognized by a CRISPR protein-derived domain of a base editor disclosed herein can be provided to a cell on a separate oligonucleotide to an insert (e.g., an AAV insert) encoding the base editor. In such embodiments, providing PAM on a separate oligonucleotide can allow cleavage of a target sequence that otherwise would not be able to be cleaved, because no adjacent PAM is present on the same polynucleotide as the target sequence.

[0586] In an embodiment, S. pyogenes Cas9 (SpCas9) can be used as a CRISPR endonuclease for genome engineering. However, others can be used. In some embodiments, a different endonuclease can be used to target certain genomic targets. In some embodiments, synthetic SpCas9-derived variants with non-NGG PAM sequences can be used. Additionally, other Cas9 orthologues from various species have been identified and these “non-SpCas9s” can bind a variety of PAM sequences that can also be useful for the present disclosure. For example, the relatively large size of SpCas9 (approximately 4 kb coding sequence) can lead to plasmids carrying the SpCas9 cDNA that cannot be efficiently expressed in a cell. Conversely, the coding sequence for Staphylococcus aureus Cas9 (SaCas9) is approximately 1 kilobase shorter than SpCas9, possibly allowing it to be efficiently expressed in a cell. Similar to SpCas9, the SaCas9 endonuclease is capable of modifying target genes in mammalian cells in vitro and in mice in vivo. In some embodiments, a Cas protein can target a different PAM sequence. In some embodiments, a target gene can be adjacent to a Cas9 PAM, 5′-NGG, for example. In other embodiments, other Cas9 orthologs can have different PAM requirements. For example, other PAMs such as those of S. thermophilus (5′-NNAGAA for CRISPRI and 5′-NGGNG for CRISPR3) and Neisseria meningitidis (5′-NNNNGATT) can also be found adjacent to a target gene.

[0587] In some embodiments, for a S. pyogenes system, a target gene sequence can precede (i.e., be 5′ to) a 5′-NGG PAM, and a 20-nt guide RNA sequence can base pair with an opposite strand to mediate a Cas9 cleavage adjacent to a PAM. In some embodiments, an adjacent cut can be or can be about 3 base pairs upstream of a PAM. In some embodiments, an adjacent cut can be or can be about 10 base pairs upstream of a PAM. In some embodiments, an adjacent cut can be or can be about 0-20 base pairs upstream of a PAM. For example, an adjacent cut can be next to, 1, 2, 3, 4, 5, 6, 7, 8, 9, 10, 11, 12, 13, 14, 15, 16, 17, 18, 19, 20, 21, 22, 23, 24, 25, 26, 27, 28, 29, or 30 base pairs upstream of a PAM. An adjacent cut can also be downstream of a PAM by 1 to 30 base pairs. The sequences of exemplary SpCas9 proteins capable of binding a PAM sequence follow:

[0588] In some embodiments, engineered SpCas9 variants are capable of recognizing protospacer adjacent motif (PAM) sequences flanked by a 3′ H (non-G PAM) (see Tables 3A-3D). In some embodiments, the SpCas9 variants recognize NRNH PAMs (where R is A or G and H is A, C or T). In some embodiments, the non-G PAM is NRRH, NRTH, or NRCH (see e.g., Miller, S. M., et al. Continuous evolution of SpCas9 variants compatible with non-G PAMs, Nat. Biotechnol. (2020), the contents of which is incorporated herein by reference in its entirety).

[0589] In some embodiments, the Cas9 domain is a recombinant Cas9 domain. In some embodiments, the recombinant Cas9 domain is a SpyMacCas9 domain. In some embodiments, the SpyMacCas9 domain is a nuclease active SpyMacCas9, a nuclease inactive SpyMacCas9 (SpyMacCas9d), or a SpyMacCas9 nickase (SpyMacCas9n). In some embodiments, the SaCas9 domain, the SaCas9d domain, or the SaCas9n domain can bind to a nucleic acid sequence having a non-canonical PAM. In some embodiments, the SpyMacCas9 domain, the SpCas9d domain, or the SpCas9n domain can bind to a nucleic acid sequence having a NAA PAM sequence.

[0590] The sequence of an exemplary Cas9 A homolog of Spy Cas9 in Streptococcus macacae with native 5′-NAAN-3′ PAM specificity is known in the art and described, for example, by Jakimo et al., (Chatterjee, et al., “A Cas9 with PAM recognition for adenine dinucleotides”, Nature Communications, vol. 11, article no. 2474 (2020)), and is in the Sequence Listing as SEQ ID NO: 241.

[0591] In some embodiments, a variant Cas9 protein harbors, H840A, P475A, W476A, N477A, D1125A, W1126A, and D1218A mutations such that the polypeptide has a reduced ability to cleave a target DNA or RNA. Such a Cas9 protein has a reduced ability to cleave a target DNA (e.g., a single stranded target DNA) but retains the ability to bind a target DNA (e.g., a single stranded target DNA). As another non-limiting example, in some embodiments, the variant Cas9 protein harbors D10A, H840A, P475A, W476A, N477A, D1125A, W1126A, and D1218A mutations such that the polypeptide has a reduced ability to cleave a target DNA. Such a Cas9 protein has a reduced ability to cleave a target DNA (e.g., a single stranded target DNA) but retains the ability to bind a target DNA (e.g., a single stranded target DNA). In some embodiments, when a variant Cas9 protein harbors W476A and WI 126A mutations or when the variant Cas9 protein harbors P475A, W476A, N477A, D1125A, W1126A, and D1218A mutations, the variant Cas9 protein does not bind efficiently to a PAM sequence. Thus, in some such cases, when such a variant Cas9 protein is used in a method of binding, the method does not require a PAM sequence. In other words, in some embodiments, when such a variant Cas9 protein is used in a method of binding, the method can include a guide RNA, but the method can be performed in the absence of a PAM sequence (and the specificity of binding is therefore provided by the targeting segment of the guide RNA). Other residues can be mutated to achieve the above effects (i.e., inactivate one or the other nuclease portions). As non-limiting examples, residues D10, G12, G17, E762, H840, N854, N863, H982, H983, A984, D986, and/or A987 can be altered (i.e., substituted). Also, mutations other than alanine substitutions are suitable.

[0592] In some embodiments, a CRISPR protein-derived domain of a base editor can comprise all or a portion of a Cas9 protein with a canonical PAM sequence (NGG). In other embodiments, a Cas9-derived domain of a base editor can employ a non-canonical PAM sequence. Such sequences have been described in the art and would be apparent to the skilled artisan. For example, Cas9 domains that bind non-canonical PAM sequences have been described in Kleinstiver, B. P., et al., “Engineered CRISPR-Cas9 nucleases with altered PAM specificities” Nature 523, 481-485 (2015); and Kleinstiver, B. P., et al., “Broadening the targeting range of Staphylococcus aureus CRISPR-Cas9 by modifying PAM recognition” Nature Biotechnology 33, 1293-1298 (2015); R. T. Walton et al. “Unconstrained genome targeting with near-PAMless engineered CRISPR-Cas9 variants” Science 10.1126/science.aba8853 (2020); Hu et al. “Evolved Cas9 variants with broad PAM compatibility and high DNA specificity,” Nature, 2018 Apr. 5, 556(7699), 57-63; Miller et al., “Continuous evolution of SpCas9 variants compatible with non-G PAMs” Nat. Biotechnol., 2020 April; 38(4):471-481; the entire contents of each are hereby incorporated by reference.

Fusion Proteins Comprising a NapDNAbp and a Cytidine Deaminase and/or Adenosine Deaminase

[0593] Some aspects of the disclosure provide fusion proteins comprising a Cas9 domain or other nucleic acid programmable DNA binding protein (e.g., Cas12) and one or more cytidine deaminase or adenosine deaminase domains. It should be appreciated that the Cas9 domain may be any of the Cas9 domains or Cas9 proteins (e.g., dCas9 or nCas9) provided herein. In some embodiments, any of the Cas9 domains or Cas9 proteins (e.g., dCas9 or nCas9) provided herein may be fused with any of the cytidine deaminases and/or adenosine deaminases provided herein. The domains of the base editors disclosed herein can be arranged in any order.

[0594] In some embodiments, the fusion protein comprises the following domains A-C, A-D, or A-E:
[0595] NH₂-[A-B-C]-COOH;
[0596] NH₂-[A-B-C-D]-COOH; or
[0597] NH₂-[A-B-C-D-E]-COOH;
   wherein A and C or A, C, and E, each comprises one or more of the following:
[0598] an adenosine deaminase domain or an active fragment thereof,
[0599] a cytidine deaminase domain or an active fragment thereof, and
[0600] wherein B or B and D, each comprises one or more domains having nucleic acid sequence specific binding activity.

[0601] In some embodiments, the fusion protein comprises the following structure:
[0602] NH₂-[Aₙ-Bₒ-Cₙ]-COOH;
[0603] NH₂-[Aₙ-Bₒ-Cₙ-Dₒ]-COOH; or
[0604] NH₂-[Aₙ-Bₒ-Cₚ-Dₒ-E]-COOH;
   wherein A and C or A, C, and E, each comprises one or more of the following:
[0605] an adenosine deaminase domain or an active fragment thereof,
[0606] a cytidine deaminase domain or an active fragment thereof, and wherein n is an integer: 1, 2, 3, 4, or 5, wherein p is an integer: 0, 1, 2, 3, 4, or 5; wherein q is an integer 0, 1, 2, 3, 4, or 5; and wherein B or B and D each comprises a domain having nucleic acid sequence specific binding activity; and wherein o is an integer: 1, 2, 3, 4, or 5.

[0607] For example, and without limitation, in some embodiments, the fusion protein comprises the structure:
[0608] NH2-[adenosine deaminase]-[Cas9 domain]-COOH;
[0609] NH2-[Cas9 domain]-[adenosine deaminase]-COOH;
[0610] NH2-[cytidine deaminase]-[Cas9 domain]-COOH;
[0611] NH2-[Cas9 domain]-[cytidine deaminase]-COOH;
[0612] NH2-[cytidine deaminase]-[Cas9 domain]-[adenosine deaminase]-COOH;
[0613] NH2-[adenosine deaminase]-[Cas9 domain]-[cytidine deaminase]-COOH;
[0614] NH2-[adenosine deaminase]-[cytidine deaminase]-[Cas9 domain]-COOH;
[0615] NH2-[cytidine deaminase]-[adenosine deaminase]-[Cas9 domain]-COOH;
[0616] NH2-[Cas9 domain]-[adenosine deaminase]-[cytidine deaminase]-COOH; or
[0617] NH2-[Cas9 domain]-[cytidine deaminase]-[adenosine deaminase]-COOH.

[0618] In some embodiments, any of the Cas12 domains or Cas12 proteins provided herein may be fused with any of the cytidine or adenosine deaminases provided herein. For example, and without limitation, in some embodiments, the fusion protein comprises the structure:
[0619] NH2-[adenosine deaminase]-[Cas12 domain]-COOH;
[0620] NH2-[Cas12 domain]-[adenosine deaminase]-COOH;
[0621] NH2-[cytidine deaminase]-[Cas12 domain]-COOH;
[0622] NH2-[Cas12 domain]-[cytidine deaminase]-COOH;
[0623] NH2-[cytidine deaminase]-[Cas12 domain]-[adenosine deaminase]-COOH;
[0624] NH2-[adenosine deaminase]-[Cas12 domain]-[cytidine deaminase]-COOH;
[0625] NH2-[adenosine deaminase]-[cytidine deaminase]-[Cas12 domain]-COOH;
[0626] NH2-[cytidine deaminase]-[adenosine deaminase]-[Cas12 domain]-COOH;
[0627] NH2-[Cas12 domain]-[adenosine deaminase]-[cytidine deaminase]-COOH; or
[0628] NH2-[Cas12 domain]-[cytidine deaminase]-[adenosine deaminase]-COOH.

[0629] In some embodiments, the adenosine deaminase is a TadA*8. Exemplary fusion protein structures include the following:
[0630] NH2-[TadA*8]-[Cas9 domain]-COOH;
[0631] NH2-[Cas9 domain]-[TadA*8]-COOH;
[0632] NH2-[TadA*8]-[Cas12 domain]-COOH; or
[0633] NH2-[Cas12 domain]-[TadA*8]-COOH.

[0634] In some embodiments, the adenosine deaminase of the fusion protein comprises a TadA*8 and a cytidine deaminase and/or an adenosine deaminase. In some embodiments, the TadA*8 is TadA*8.1, TadA*8.2, TadA*8.3, TadA*8.4, TadA*8.5, TadA*8.6, TadA*8.7, TadA*8.8, TadA*8.9, TadA*8.10, TadA*8.11, TadA*8.12, TadA*8.13, TadA*8.14, TadA*8.15, TadA*8.16, TadA*8.17, TadA*8.18, TadA*8.19, TadA*8.20, TadA*8.21, TadA*8.22, TadA*8.23, or TadA*8.24.

[0635] Exemplary fusion protein structures include the following:
[0636] NH2-[TadA*8]-[Cas9/Cas12]-[adenosine deaminase]-COOH;
[0637] NH2-[adenosine deaminase]-[Cas9/Cas12]-[TadA*8]-COOH;
[0638] NH2-[TadA*8]-[Cas9/Cas12]-[cytidine deaminase]-COOH; or
[0639] NH2-[cytidine deaminase]-[Cas9/Cas12]-[TadA*8]-COOH.

[0640] In some embodiments, the adenosine deaminase of the fusion protein comprises a TadA*9 and a cytidine deaminase and/or an adenosine deaminase. Exemplary fusion protein structures include the following:
[0641] NH2-[TadA*9]-[Cas9/Cas12]-[adenosine deaminase]-COOH;
[0642] NH2-[adenosine deaminase]-[Cas9/Cas12]-[TadA*9]-COOH;
[0643] NH2-[TadA*9]-[Cas9/Cas12]-[cytidine deaminase]-COOH; or
[0644] NH2-[cytidine deaminase]-[Cas9/Cas12]-[TadA*9]-COOH.

[0645] In some embodiments, the fusion protein can comprise a deaminase flanked by an N-terminal fragment and a C-terminal fragment of a Cas9 or Cas12 polypeptide. In some embodiments, the fusion protein comprises a cytidine deaminase flanked by an N-terminal fragment and a C-terminal fragment of a Cas9 or Cas12 polypeptide. In some embodiments, the fusion protein comprises an adenosine deaminase flanked by an N-terminal fragment and a C-terminal fragment of a Cas9 or Cas 12 polypeptide.

[0646] In some embodiments, the fusion proteins comprising a cytidine deaminase or adenosine deaminase and a napDNAbp (e.g., Cas9 or Cas12 domain) do not include a linker sequence. In some embodiments, a linker is present between the cytidine or adenosine deaminase and the napDNAbp. In some embodiments, the “-” used in the general architecture above indicates the presence of an optional linker. In some embodiments, cytidine or adenosine deaminase and the napDNAbp are fused via any of the linkers provided herein. For example, in some embodiments the cytidine or adenosine deaminase and the napDNAbp are fused via any of the linkers provided herein.

[0647] It should be appreciated that the fusion proteins of the present disclosure may comprise one or more additional features. For example, in some embodiments, the fusion protein may comprise inhibitors, cytoplasmic localization sequences, export sequences, such as nuclear export sequences, or other localization sequences, as well as sequence tags that are useful for solubilization, purification, or detection of the fusion proteins. Suitable protein tags provided herein include, but are not limited to, biotin carboxylase carrier protein (BCCP) tags, myc-tags, calmodulin-tags, FLAG-tags, hemagglutinin (HA)-tags, polyhistidine tags, also referred to as histidine tags or His-tags, maltose binding protein (MBP)-tags, nus-tags, glutathione-S-transferase (GST)-tags, green fluorescent protein (GFP)-tags, thioredoxin-tags, S-tags, Softags (e.g., Softag 1, Softag 3), strep-tags, biotin ligase tags, FlAsH tags, V5 tags, and SBP-tags. Additional suitable sequences will be apparent to those of skill in the art. In some embodiments, the fusion protein comprises one or more His tags.

[0648] Exemplary, yet nonlimiting, fusion proteins are described in International PCT Application Nos. PCT/2017/044935, PCT/US2019/044935, and PCT/US2020/016288, each of which is incorporated herein by reference for its entirety.

### Fusion Proteins Comprising a Nuclear Localiazation Sequence (NLS)

[0649] In some embodiments, the fusion proteins provided herein further comprise one or more (e.g., 2, 3, 4, 5) nuclear targeting sequences, for example a nuclear localization sequence (NLS). In one embodiment, a bipartite NLS is used. In some embodiments, a NLS comprises an amino acid sequence that facilitates the importation of a protein, that comprises an NLS, into the cell nucleus (e.g., by nuclear transport). In some embodiments, the NLS is fused to the N-terminus or the C-terminus of the fusion protein. In some embodiments, the NLS is fused to the C-terminus or N-terminus of an nCas9 domain or a dCas9 domain. In some embodiments, the NLS is fused to the N-terminus or C-terminus of the Cas12 domain. In some embodiments, the NLS is fused to the N-terminus or C-terminus of the cytidine or adenosine deaminase. In some embodiments, the NLS is fused to the fusion protein via one or more linkers. In some embodiments, the NLS is fused to the fusion protein without a linker. In some embodiments, the NLS comprises an amino acid sequence of any one of the NLS sequences provided or referenced herein. Additional nuclear localization sequences are known in the art and would be apparent to the skilled artisan. For example, NLS sequences are described in Plank et al., PCT/EP2000/011690, the contents of which are incorporated herein by reference for their disclosure of exemplary nuclear localization sequences. In some embodiments, an NLS comprises the amino acid sequence PKKKRKVEGADKRTADGSEFESPKKKRKV (SEQ ID NO: 332), KRTADGSEFESPKKKRKV (SEQ ID NO: 194), KRPAATKKAGQAKKKK (SEQ ID NO: 195), KKTELQTTNAENKTKKL (SEQ ID NO: 196), KRGINDRNFWRGENGRKTR (SEQ ID NO: 197), RKSGKIAAIVVKRPRKPKKKRKV (SEQ ID NO: 333), or MDSLLMNRRKFLYQFKNVRWAKGRRETYLC (SEQ ID NO: 200).

[0650] In some embodiments, the fusion proteins comprising a cytidine or adenosine deaminase, a Cas9 domain, and an NLS do not comprise a linker sequence. In some embodiments, linker sequences between one or more of the domains or proteins (e.g., cytidine or adenosine deaminase, Cas9 domain or NLS) are present. In some embodiments, a linker is present between the cytidine deaminase and adenosine deaminase domains and the napDNAbp. In some embodiments, the “-” used in the general architecture below indicates the presence of an optional linker. In some embodiments, the cytidine deaminase and adenosine deaminase and the napDNAbp are fused via any of the linkers provided herein. For example, in some embodiments the cytidine deaminase and adenosine deaminase and the napDNAbp are fused via any of the linkers provided herein.

[0651] In some embodiments, the general architecture of exemplary napDNAbp (e.g., Cas9 or Cas12) fusion proteins with a cytidine or adenosine deaminase and a napDNAbp (e.g., Cas9 or Cas12) domain comprises any one of the following structures, where NLS is a nuclear localization sequence (e.g., any NLS provided herein), NH₂ is the N-terminus of the fusion protein, and COOH is the C-terminus of the fusion protein:
[0652] NH₂-NLS-[cytidine deaminase]-[napDNAbp domain]-COOH;
[0653] NH₂-NLS [napDNAbp domain]-[cytidine deaminase]-COOH;
[0654] NH₂-[cytidine deaminase]-[napDNAbp domain]-NLS-COOH;
[0655] NH₂-[napDNAbp domain]-[cytidine deaminase]-NLS-COOH;
[0656] NH₂-NLS-[adenosine deaminase]-[napDNAbp domain]-COOH;
[0657] NH₂-NLS [napDNAbp domain]-[adenosine deaminase]-COOH;
[0658] NH₂-[adenosine deaminase]-[napDNAbp domain]-NLS-COOH;
[0659] NH₂-[napDNAbp domain]-[adenosine deaminase]-NLS-COOH;
[0660] NH₂-NLS-[cytidine deaminase]-[napDNAbp domain]-[adenosine deaminase]-COOH;
[0661] NH₂-NLS-[adenosine deaminase]-[napDNAbp domain]-[cytidine deaminase]-COOH;
[0662] NH₂-NLS-[adenosine deaminase] [cytidine deaminase]-[napDNAbp domain]-COOH;
[0663] NH₂-NLS-[cytidine deaminase]-[adenosine deaminase]-[napDNAbp domain]-COOH;
[0664] NH₂-NLS-[napDNAbp domain]-[adenosine deaminase]-[cytidine deaminase]-COOH;
[0665] NH₂-NLS-[napDNAbp domain]-[cytidine deaminase]-[adenosine deaminase]-COOH;
[0666] NH₂-[cytidine deaminase]-[napDNAbp domain]-[adenosine deaminase]-NLS-COOH;
[0667] NH₂-[adenosine deaminase]-[napDNAbp domain]-[cytidine deaminase]-NLS-COOH;
[0668] NH₂-[adenosine deaminase] [cytidine deaminase]-[napDNAbp domain]-NLS-COOH;
[0669] NH₂-[cytidine deaminase]-[adenosine deaminase]-[napDNAbp domain]-NLS-COOH;
[0670] NH₂-[napDNAbp domain]-[adenosine deaminase]-[cytidine deaminase]-NLS-COOH; or
[0671] NH₂-[napDNAbp domain]-[cytidine deaminase]-[adenosine deaminase]-NLS-COOH. In some embodiments, the NLS is present in a linker or the NLS is flanked by linkers, for example described herein. A bipartite NLS comprises two basic amino acid clusters, which are separated by a relatively short spacer sequence (hence bipartite—2 parts, while monopartite NLSs are not). The NLS of nucleoplasmin, KR[PAATKKAGQA]KKKK (SEQ ID NO: 195), is the prototype of the ubiquitous bipartite signal: two clusters of basic amino acids, separated by a spacer of about 10 amino acids. The sequence of an exemplary bipartite NLS follows:

| (SEQ ID NO: 332) | |
|---|---|
| | PKKKRKVEGADKRTADGSEFESPKKKRKV |

[0672] A vector that encodes a CRISPR enzyme comprising one or more nuclear localization sequences (NLSs) can be used. For example, there can be or be about 1, 2, 3, 4, 5, 6, 7, 8, 9, 10 NLSs used. A CRISPR enzyme can comprise the NLSs at or near the amino-terminus, about or more than about 1, 2, 3, 4, 5, 6, 7, 8, 9, 10 NLSs at or near the carboxy-terminus, or any combination thereof (e.g., one or more NLS at the amino-terminus and one or more NLS at the carboxy terminus). When more than one NLS is present, each can be selected independently of others, such that a single NLS can be present in more than one copy and/or in combination with one or more other NLSs present in one or more copies.

[0673] CRISPR enzymes used in the methods can comprise about 6 NLSs. An NLS is considered near the N- or C-terminus when the nearest amino acid to the NLS is within about 50 amino acids along a polypeptide chain from the N- or C-terminus, e.g., within 1, 2, 3, 4, 5, 10, 15, 20, 25, 30, 40, or 50 amino acids.

### Additional Domains

[0674] A base editor described herein can include any domain which helps to facilitate the nucleobase editing, modification or altering of a nucleobase of a polynucleotide. In some embodiments, a base editor comprises a polynucleotide programmable nucleotide binding domain (e.g., Cas9), a nucleobase editing domain (e.g., deaminase domain), and one or more additional domains. In some embodiments, the additional domain can facilitate enzymatic or catalytic functions of the base editor, binding functions of the base editor, or be inhibitors of cellular machinery (e.g., enzymes) that could interfere with the desired base editing result. In some embodiments, a base editor can comprise a nuclease, a nickase, a recombinase, a deaminase, a methyltransferase, a methylase, an acetylase, an acetyltransferase, a transcriptional activator, or a transcriptional repressor domain.

[0675] In some embodiments, a base editor can comprise an uracil glycosylase inhibitor (UGI) domain. In some embodiments, cellular DNA repair response to the presence of U: G heteroduplex DNA can be responsible for a decrease in nucleobase editing efficiency in cells. In such embodiments, uracil DNA glycosylase (UDG) can catalyze removal of U from DNA in cells, which can initiate base excision repair (BER), mostly resulting in reversion of the U:G pair to a C:G pair. In such embodiments, BER can be inhibited in base editors comprising one or more domains that bind the single strand, block the edited base, inhibit UGI, inhibit BER, protect the edited base, and/or promote repairing of the non-edited strand. Thus, this disclosure contemplates a base editor fusion protein comprising a UGI domain.

[0676] In some embodiments, a base editor comprises as a domain all or a portion of a double-strand break (DSB) binding protein. For example, a DSB binding protein can include a Gam protein of bacteriophage Mu that can bind to the ends of DSBs and can protect them from degradation. See Komor, A. C., et al., “Improved base excision repair inhibition and bacteriophage Mu Gam protein yields C:G-to-T:A base editors with higher efficiency and product purity” Science Advances 3:eaao4774 (2017), the entire content of which is hereby incorporated by reference.

[0677] Additionally, in some embodiments, a Gam protein can be fused to an N terminus of a base editor. In some embodiments, a Gam protein can be fused to a C terminus of a base editor. The Gam protein of bacteriophage Mu can bind to the ends of double strand breaks (DSBs) and protect them from degradation. In some embodiments, using Gam to bind the free ends of DSB can reduce indel formation during the process of base editing. In some embodiments, 174-residue Gam protein is fused to the N terminus of the base editors. See Komor, A. C., et al., “Improved base excision repair inhibition and bacteriophage Mu Gam protein yields C:G-to-T:A base editors with higher efficiency and product purity” Science Advances 3:eaao4774 (2017). In some embodiments, a mutation or mutations can change the length of a base editor domain relative to a wild type domain. For example, a deletion of at least one amino acid in at least one domain can reduce the length of the base editor. In another case, a mutation or mutations do not change the length of a domain relative to a wild type domain. For example, substitutions in any domain does not change the length of the base editor.

[0678] Non-limiting examples of such base editors, where the length of all the domains is the same as the wild type domains, can include:
[0679] NH2-[nucleobase editing domain]-Linker1-[APOBEC1]-Linker2-[nucleobase editing domain]-COOH;
[0680] NH2-[nucleobase editing domain]-Linker1-[APOBEC1]-[nucleobase editing domain]-COOH;
[0681] NH2-[nucleobase editing domain]-[APOBEC1]-Linker2-[nucleobase editing domain]-COOH;
[0682] NH2-[nucleobase editing domain]-[APOBEC1]-[nucleobase editing domain]-COOH;
[0683] NH2-[nucleobase editing domain]-Linker1-[APOBEC1]-Linker2-[nucleobase editing domain]-[UGI]-COOH;
[0684] NH2-[nucleobase editing domain]-Linker1-[APOBEC1]-[nucleobase editing domain]-[UGI]-COOH;
[0685] NH2-[nucleobase editing domain]-[APOBEC1]-Linker2-[nucleobase editing domain]-[UGI]-COOH;
[0686] NH2-[nucleobase editing domain]-[APOBEC1]-[nucleobase editing domain]-[UGI]-COOH;
[0687] NH2-[UGI]-[nucleobase editing domain]-Linker1-[APOBEC1]-Linker2-[nucleobase editing domain]-COOH;
[0688] NH2-[UGI]-[nucleobase editing domain]-Linker1-[APOBEC1]-[nucleobase editing domain]-COOH;
[0689] NH2-[UGI]-[nucleobase editing domain]-[APOBEC1]-Linker2-[nucleobase editing domain]-COOH; or
[0690] NH2-[UGI]-[nucleobase editing domain]-[APOBEC1]-[nucleobase editing domain]-COOH.

### Base Editor System

[0691] Provided herein are systems, compositions, and methods for editing a nucleobase using a base editor system. In some embodiments, the base editor system comprises (1) a base editor (BE) comprising a polynucleotide programmable nucleotide binding domain and a nucleobase editing domain (e.g., a deaminase domain) for editing the nucleobase; and (2) a guide polynucleotide (e.g., guide RNA) in conjunction with the polynucleotide programmable nucleotide binding domain. In some embodiments, the base editor system is a cytidine base editor (CBE) or an adenosine base editor (ABE). In some embodiments, the polynucleotide programmable nucleotide binding domain is a polynucleotide programmable DNA or RNA binding domain. In some embodiments, the nucleobase editing domain is a deaminase domain. In some embodiments, a deaminase domain can be a cytidine deaminase or an cytosine deaminase. In some embodiments, a deaminase domain can be an adenine deaminase or an adenosine deaminase. In some embodiments, the adenosine base editor can deaminate adenine in DNA. In some embodiments, the base editor is capable of deaminating a cytidine in DNA.

[0692] In some embodiments, a base editing system as provided herein provides a new approach to genome editing that uses a fusion protein containing a catalytically defective Streptococcus pyogenes Cas9, a deaminase (e.g., cytidine or adenosine deaminase), and an inhibitor of base excision repair to induce programmable, single nucleotide (C→T or A→G) changes in DNA without generating double-strand DNA breaks, without requiring a donor DNA template, and without inducing an excess of stochastic insertions and deletions.

[0693] Details of nucleobase editing proteins are described in International PCT Application Nos. PCT/2017/045381 (WO2018/027078) and PCT/US2016/058344 (WO2017/070632), each of which is incorporated herein by reference for its entirety. Also see Komor, A. C., et al., “Programmable editing of a target base in genomic DNA without double-stranded DNA cleavage” Nature 533, 420-424 (2016); Gaudelli, N. M., et al., “Programmable base editing of A•T to G•C in genomic DNA without DNA cleavage” Nature 551, 464-471 (2017); and Komor, A. C., et al., “Improved base excision repair inhibition and bacteriophage Mu Gam protein yields C:G-to-T:A base editors with higher efficiency and product purity” Science Advances 3:eaao4774 (2017), the entire contents of which are hereby incorporated by reference.

[0694] Use of the base editor system provided herein comprises the steps of: (a) contacting a target nucleotide sequence of a polynucleotide (e.g., double- or single stranded DNA or RNA) of a subject with a base editor system comprising a nucleobase editor (e.g., an adenosine base editor or a cytidine base editor) and a guide polynucleic acid (e.g., gRNA), wherein the target nucleotide sequence comprises a targeted nucleobase pair; (b) inducing strand separation of said target region; (c) converting a first nucleobase of said target nucleobase pair in a single strand of the target region to a second nucleobase; and (d) cutting no more than one strand of said target region, where a third nucleobase complementary to the first nucleobase base is replaced by a fourth nucleobase complementary to the second nucleobase. It should be appreciated that in some embodiments, step (b) is omitted. In some embodiments, said targeted nucleobase pair is a plurality of nucleobase pairs in one or more genes. In some embodiments, the base editor system provided herein is capable of multiplex editing of a plurality of nucleobase pairs in one or more genes. In some embodiments, the plurality of nucleobase pairs is located in the same gene. In some embodiments, the plurality of nucleobase pairs is located in one or more genes, wherein at least one gene is located in a different locus.

[0695] In some embodiments, the cut single strand (nicked strand) is hybridized to the guide nucleic acid. In some embodiments, the cut single strand is opposite to the strand comprising the first nucleobase. In some embodiments, the base editor comprises a Cas9 domain. In some embodiments, the first base is adenine, and the second base is not a G, C, A, or T. In some embodiments, the second base is inosine.

[0696] In some embodiments, a single guide polynucleotide may be utilized to target a deaminase to a target nucleic acid sequence. In some embodiments, a single pair of guide polynucleotides may be utilized to target different deaminases to a target nucleic acid sequence.

[0697] The components of a base editor system (e.g., a deaminase domain, a guide RNA, and/or a polynucleotide programmable nucleotide binding domain) may be associated with each other covalently or non-covalently. For example, in some embodiments, the deaminase domain can be targeted to a target nucleotide sequence by a polynucleotide programmable nucleotide binding domain, optionally where the polynucleotide programmable nucleotide binding domain is complexed with a polynucleotide (e.g., a guide RNA). In some embodiments, a polynucleotide programmable nucleotide binding domain can be fused or linked to a deaminase domain. In some embodiments, a polynucleotide programmable nucleotide binding domain can target a deaminase domain to a target nucleotide sequence by non-covalently interacting with or associating with the deaminase domain. For example, in some embodiments, the nucleobase editing component (e.g., the deaminase component) comprises an additional heterologous portion or domain that is capable of interacting with, associating with, or capable of forming a complex with a corresponding heterologous portion, antigen, or domain that is part of a polynucleotide programmable nucleotide binding domain and/or a guide polynucleotide (e.g., a guide RNA) complexed therewith. In some embodiments, the polynucleotide programmable nucleotide binding domain, and/or a guide polynucleotide (e.g., a guide RNA) complexed therewith, comprises an additional heterologous portion or domain that is capable of interacting with, associating with, or capable of forming a complex with a corresponding heterologous portion, antigen, or domain that is part of a nucleobase editing domain (e.g., the deaminase component). In some embodiments, the additional heterologous portion may be capable of binding to, interacting with, associating with, or forming a complex with a polypeptide. In some embodiments, the additional heterologous portion may be capable of binding to, interacting with, associating with, or forming a complex with a polynucleotide. In some embodiments, the additional heterologous portion may be capable of binding to a guide polynucleotide. In some embodiments, the additional heterologous portion may be capable of binding to a polypeptide linker. In some embodiments, the additional heterologous portion is capable of binding to a polynucleotide linker. An additional heterologous portion may be a protein domain. In some embodiments, an additional heterologous portion comprises a polypeptide, such as a 22 amino acid RNA-binding domain of the lambda bacteriophage antiterminator protein N (N22p), a 2G12 IgG homodimer domain, an ABI, an antibody (e.g. an antibody that binds a component of the base editor system or a heterologous portion thereof) or fragment thereof (e.g. heavy chain domain 2 (CH2) of IgM (MHD2) or IgE (EHD2), an immunoglobulin Fc region, a heavy chain domain 3 (CH3) of IgG or IgA, a heavy chain domain 4 (CH4) of IgM or IgE, an Fab, an Fab2, miniantibodies, and/or ZIP antibodies), a barnase-barstar dimer domain, a Bcl-xL domain, a Calcineurin A (CAN) domain, a Cardiac phospholamban transmembrane pentamer domain, a collagen domain, a Com RNA binding protein domain (e.g. SfMu Com coat protein domain, and SfMu Com binding protein domain), a Cyclophilin-Fas fusion protein (CyP-Fas) domain, a Fab domain, an Fe domain, a fibritin foldon domain, an FK506 binding protein (FKBP) domain, an FKBP binding domain (FRB) domain of mTOR, a foldon domain, a fragment X domain, a GAI domain, a GID1 domain, a Glycophorin A transmembrane domain, a GyrB domain, a Halo tag, an HIV Gp41 trimerisation domain, an HPV45 oncoprotein E7 C-terminal dimer domain, a hydrophobic polypeptide, a K Homology (KH) domain, a Ku protein domain (e.g., a Ku heterodimer), a leucine zipper, a LOV domain, a mitochondrial antiviral-signaling protein CARD filament domain, an MS2 coat protein domain (MCP), a non-natural RNA aptamer ligand that binds a corresponding RNA motif/aptamer, a parathyroid hormone dimerization domain, a PP7 coat protein (PCP) domain, a PSD95-Dlgl-zo-1 (PDZ) domain, a PYL domain, a SNAP tag, a SpyCatcher moiety, a SpyTag moiety, a streptavidin domain, a streptavidin-binding protein domain, a streptavidin binding protein (SBP) domain, a telomerase Sm7 protein domain (e.g. Sm7 homoheptamer or a monomeric Sm-like protein), and/or fragments thereof. In embodiments, an additional heterologous portion comprises a polynucleotide (e.g., an RNA motif), such as an MS2 phage operator stem-loop (e.g. an MS2, an MS2 C-5 mutant, or an MS2 F-5 mutant), a non-natural RNA motif, a PP7 opterator stem-loop, an SfMu phate Com stem-loop, a steril alpha motif, a telomerase Ku binding motif, a telomerase Sm7 binding motif, and/or fragments thereof. Non-limiting examples of additional heterologous portions include polypeptides with at least about 85% sequence identity to any one or more of SEQ ID NOs: 385, 387, 389, 391-393, or fragments thereof. Non-limiting examples of additional heterologous portions include polynucleotides with at least about 85% sequence identity to any one or more of SEQ ID NOs: 384, 386, 388, 390, or fragments thereof.

[0698] A base editor system may further comprise a guide polynucleotide component. It should be appreciated that components of the base editor system may be associated with each other via covalent bonds, noncovalent interactions, or any combination of associations and interactions thereof. In some embodiments, a deaminase domain can be targeted to a target nucleotide sequence by a guide polynucleotide. For example, in some embodiments, the nucleobase editing component of the base editor system (e.g., the deaminase component) comprises an additional heterologous portion or domain (e.g., polynucleotide binding domain such as an RNA or DNA binding protein) that is capable of interacting with, associating with, or capable of forming a complex with a heterologous portion or segment (e.g., a polynucleotide motif), or antigen of a guide polynucleotide. In some embodiments, the additional heterologous portion or domain (e.g., polynucleotide binding domain such as an RNA or DNA binding protein) can be fused or linked to the deaminase domain. In some embodiments, the additional heterologous portion may be capable of binding to, interacting with, associating with, or forming a complex with a polypeptide. In some embodiments, the additional heterologous portion may be capable of binding to, interacting with, associating with, or forming a complex with a polynucleotide. In some embodiments, the additional heterologous portion may be capable of binding to a guide polynucleotide. In some embodiments, the additional heterologous portion may be capable of binding to a polypeptide linker. In some embodiments, the additional heterologous portion may be capable of binding to a polynucleotide linker. An additional heterologous portion may be a protein domain. In some embodiments, an additional heterologous portion comprises a polypeptide, such as a 22 amino acid RNA-binding domain of the lambda bacteriophage antiterminator protein N (N22p), a 2G12 IgG homodimer domain, an ABI, an antibody (e.g. an antibody that binds a component of the base editor system or a heterologous portion thereof) or fragment thereof (e.g. heavy chain domain 2 (CH2) of IgM (MHD2) or IgE (EHD2), an immunoglobulin Fc region, a heavy chain domain 3 (CH3) of IgG or IgA, a heavy chain domain 4 (CH4) of IgM or IgE, an Fab, an Fab2, miniantibodies, and/or ZIP antibodies), a barnase-barstar dimer domain, a Bcl-xL domain, a Calcineurin A (CAN) domain, a Cardiac phospholamban transmembrane pentamer domain, a collagen domain, a Com RNA binding protein domain (e.g. SfMu Com coat protein domain, and SfMu Com binding protein domain), a Cyclophilin-Fas fusion protein (CyP-Fas) domain, a Fab domain, an Fe domain, a fibritin foldon domain, an FK506 binding protein (FKBP) domain, an FKBP binding domain (FRB) domain of mTOR, a foldon domain, a fragment X domain, a GAI domain, a GID1 domain, a Glycophorin A transmembrane domain, a GyrB domain, a Halo tag, an HIV Gp41 trimerisation domain, an HPV45 oncoprotein E7 C-terminal dimer domain, a hydrophobic polypeptide, a K Homology (KH) domain, a Ku protein domain (e.g., a Ku heterodimer), a leucine zipper, a LOV domain, a mitochondrial antiviral-signaling protein CARD filament domain, an MS2 coat protein domain (MCP), a non-natural RNA aptamer ligand that binds a corresponding RNA motif/aptamer, a parathyroid hormone dimerization domain, a PP7 coat protein (PCP) domain, a PSD95-Dlgl-zo-1 (PDZ) domain, a PYL domain, a SNAP tag, a SpyCatcher moiety, a SpyTag moiety, a streptavidin domain, a streptavidin-binding protein domain, a streptavidin binding protein (SBP) domain, a telomerase Sm7 protein domain (e.g. Sm7 homoheptamer or a monomeric Sm-like protein), and/or fragments thereof. In embodiments, an additional heterologous portion comprises a polynucleotide (e.g., an RNA motif), such as an MS2 phage operator stem-loop (e.g. an MS2, an MS2 C-5 mutant, or an MS2 F-5 mutant), a non-natural RNA motif, a PP7 opterator stem-loop, an SfMu phate Com stem-loop, a steril alpha motif, a telomerase Ku binding motif, a telomerase Sm7 binding motif, and/or fragments thereof. Non-limiting examples of additional heterologous portions include polypeptides with at least about 85% sequence identity to any one or more of SEQ ID NOs: 385, 387, 389, 391-393, or fragments thereof. Non-limiting examples of additional heterologous portions include polynucleotides with at least about 85% sequence identity to any one or more of SEQ ID NOs: 384, 386, 388, 390, or fragments thereof.

[0699] In some embodiments, a base editor system can further comprise an inhibitor of base excision repair (BER) component. It should be appreciated that components of the base editor system may be associated with each other via covalent bonds, noncovalent interactions, or any combination of associations and interactions thereof. The inhibitor of BER component may comprise a base excision repair inhibitor. In some embodiments, the inhibitor of base excision repair can be a uracil DNA glycosylase inhibitor (UGI). In some embodiments, the inhibitor of base excision repair can be an inosine base excision repair inhibitor. In some embodiments, the inhibitor of base excision repair can be targeted to the target nucleotide sequence by the polynucleotide programmable nucleotide binding domain, optionally where the polynucleotide programmable nucleotide binding domain is complexed with a polynucleotide (e.g., a guide RNA). In some embodiments, a polynucleotide programmable nucleotide binding domain can be fused or linked to an inhibitor of base excision repair. In some embodiments, a polynucleotide programmable nucleotide binding domain can be fused or linked to a deaminase domain and an inhibitor of base excision repair. In some embodiments, a polynucleotide programmable nucleotide binding domain can target an inhibitor of base excision repair to a target nucleotide sequence by non-covalently interacting with or associating with the inhibitor of base excision repair. For example, in some embodiments, the inhibitor of base excision repair component comprises an additional heterologous portion or domain that is capable of interacting with, associating with, or capable of forming a complex with a corresponding additional heterologous portion, antigen, or domain that is part of a polynucleotide programmable nucleotide binding domain. In some embodiments, the polynucleotide programming nucleotide binding domain component, and/or a guide polynucleotide (e.g., a guide RNA) complexed therewith, comprises an additional heterologous portion or domain that is capable of interacting with, associating with, or capable of forming a corresponding heterologous portion, antigen, or domain that is part of an inhibitor of base excision repair component. In some embodiments, the inhibitor of base excision repair can be targeted to the target nucleotide sequence by the guide polynucleotide. For example, in some embodiments, the inhibitor of base excision repair comprises an additional heterologous portion or domain (e.g., polynucleotide binding domain such as an RNA or DNA binding protein) that is capable of interacting with, associating with, or capable of forming a complex with a portion or segment (e.g., a polynucleotide motif) of a guide polynucleotide. In some embodiments, the additional heterologous portion or domain of the guide polynucleotide (e.g., polynucleotide binding domain such as an RNA or DNA binding protein) can be fused or linked to the inhibitor of base excision repair. In some embodiments, the additional heterologous portion may be capable of binding to, interacting with, associating with, or forming a complex with a polynucleotide. In some embodiments, the additional heterologous portion may be capable of binding to a guide polynucleotide. In some embodiments, the additional heterologous portion may be capable of binding to a polypeptide linker. In some embodiments, the additional heterologous portion may be capable of binding to a polynucleotide linker. An additional heterologous portion may be a protein domain. In some embodiments, an additional heterologous portion comprises a polypeptide, such as a 22 amino acid RNA-binding domain of the lambda bacteriophage antiterminator protein N (N22p), a 2G12 IgG homodimer domain, an ABI, an antibody (e.g. an antibody that binds a component of the base editor system or a heterologous portion thereof) or fragment thereof (e.g. heavy chain domain 2 (CH2) of IgM (MHD2) or IgE (EHD2), an immunoglobulin Fc region, a heavy chain domain 3 (CH3) of IgG or IgA, a heavy chain domain 4 (CH4) of IgM or IgE, an Fab, an Fab2, miniantibodies, and/or ZIP antibodies), a barnase-barstar dimer domain, a Bcl-xL domain, a Calcineurin A (CAN) domain, a Cardiac phospholamban transmembrane pentamer domain, a collagen domain, a Com RNA binding protein domain (e.g. SfMu Com coat protein domain, and SfMu Com binding protein domain), a Cyclophilin-Fas fusion protein (CyP-Fas) domain, a Fab domain, an Fe domain, a fibritin foldon domain, an FK506 binding protein (FKBP) domain, an FKBP binding domain (FRB) domain of mTOR, a foldon domain, a fragment X domain, a GAI domain, a GID1 domain, a Glycophorin A transmembrane domain, a GyrB domain, a Halo tag, an HIV Gp41 trimerisation domain, an HPV45 oncoprotein E7 C-terminal dimer domain, a hydrophobic polypeptide, a K Homology (KH) domain, a Ku protein domain (e.g., a Ku heterodimer), a leucine zipper, a LOV domain, a mitochondrial antiviral-signaling protein CARD filament domain, an MS2 coat protein domain (MCP), a non-natural RNA aptamer ligand that binds a corresponding RNA motif/aptamer, a parathyroid hormone dimerization domain, a PP7 coat protein (PCP) domain, a PSD95-Dlgl-zo-1 (PDZ) domain, a PYL domain, a SNAP tag, a SpyCatcher moiety, a SpyTag moiety, a streptavidin domain, a streptavidin-binding protein domain, a streptavidin binding protein (SBP) domain, a telomerase Sm7 protein domain (e.g. Sm7 homoheptamer or a monomeric Sm-like protein), and/or fragments thereof. In embodiments, an additional heterologous portion comprises a polynucleotide (e.g., an RNA motif), such as an MS2 phage operator stem-loop (e.g. an MS2, an MS2 C-5 mutant, or an MS2 F-5 mutant), a non-natural RNA motif, a PP7 opterator stem-loop, an SfMu phate Com stem-loop, a steril alpha motif, a telomerase Ku binding motif, a telomerase Sm7 binding motif, and/or fragments thereof. Non-limiting examples of additional heterologous portions include polypeptides with at least about 85% sequence identity to any one or more of SEQ ID NOs: 385, 387, 389, 391-393, or fragments thereof. Non-limiting examples of additional heterologous portions include polynucleotides with at least about 85% sequence identity to any one or more of SEQ ID NOs: 384, 386, 388, 390, or fragments thereof.

[0700] In some instances, components of the base editing system are associated with one another through the interaction of leucine zipper domains (e.g., SEQ ID NOs: 392 and 393). In some cases, components of the base editing system are associated with one another through polypeptide domains (e.g., FokI domains) that associate to form protein complexes containing about, at least about, or no more than about 1, 2 (i.e., dimerize), 3, 4, 5, 6, 7, 8, 9, 10 polypeptide domain units, optionally the polypeptide domains may include alterations that reduce or eliminate an activity thereof.

[0701] In some instances, components of the base editing system are associated with one another through the interaction of multimeric antibodies or fragments thereof (e.g., IgG, IgD, IgA, IgM, IgE, a heavy chain domain 2 (CH2) of IgM (MHD2) or IgE (EHD2), an immunoglobulin Fc region, a heavy chain domain 3 (CH3) of IgG or IgA, a heavy chain domain 4 (CH4) of IgM or IgE, an Fab, and an Fab2). In some instances, the antibodies are dimeric, trimeric, or tetrameric. In embodiments, the dimeric antibodies bind a polypeptide or polynucleotide component of the base editing system.

[0702] In some cases, components of the base editing system are associated with one another through the interaction of a polynucleotide-binding protein domain(s) with a polynucleotide(s). In some instances, components of the base editing system are associated with one another through the interaction of one or more polynucleotide-binding protein domains with polynucleotides that are self complementary and/or complementary to one another so that complementary binding of the polynucleotides to one another brings into association their respective bound polynucleotide-binding protein domain(s).

[0703] In some instances, components of the base editing system are associated with one another through the interaction of a polypeptide domain(s) with a small molecule(s) (e.g., chemical inducers of dimerization (CIDs), also known as “dimerizers”). Non-limiting examples of CIDs include those disclosed in Amara, et al., “A versatile synthetic dimerizer for the regulation of protein-protein interactions,” PNAS, 94:10618-10623 (1997); and Voß, et al. “Chemically induced dimerization: reversible and spatiotemporal control of protein function in cells,” Current Opinion in Chemical Biology, 28:194-201 (2015), the disclosures of each of which are incorporated herein by reference in their entireties for all purposes. Non-limiting examples of polypeptides that can dimerize and their corresponding dimerizing agents are provided in Table 10.1 below.

TABLE 10.1
Chemically induced dimerization systems.

| | | Dimerizing |
|---|---|---|
| Dimerizing Polypeptides | | agent |
| FKBP | FKBP | FK1012 |
| FKBP | Calcineurin A (CNA) | FK506 |
| FKBP | CyP-Fas | FKCsA |
| FKBP | FRB (FKBP-rapamycin-binding) | Rapamycin |
| | domain of mTOR | |
| GyrB | GyrB | Coumermycin |
| GAI | GID1 (gibberellin insensitive dwarf 1) | Gibberellin |
| ABI | PYL | Abscisic acid |
| ABI | PYRMandi | Mandipropamid |
| SNAP-tag | HaloTag | HaXS |
| eDHFR | HaloTag | TMP-HTag |
| Bcl-xL | Fab (AZ1) | ABT-737 |

[0704] In embodiments, the additional heterologous portion is part of a guide RNA molecule. In some instances, the additional heterologous portion contains or is an RNA motif. The RNA motif may be positioned at the 5′ or 3′ end of the guide RNA molecule or various positions of a guide RNA molecule. In embodiments, the RNA motif is positioned within the guide RNA to reduce steric hindrance, optionally where such hindrance is associated with other bulky loops of an RNA scaffold. In some instances, it is advantageous to link the RNA motif is linked to other portions of the guide RNA by way of a linker, where the linker can be about, at least about, or no more than about 1, 2, 3, 4, 5, 6, 7, 8, 9, 10, or more nucleotides in length. Optionally, the linker contains a GC-rich nucleotide sequence. The guide RNA can contain 1, 2, 3, 4, 5, or more copies of the RNA motif, optionally where they are positioned consecutively, and/or optionally where they are each separated from one another by a linker(s). The RNA motif may include any one or more of the polynucleotide modifications described herein. Non-limiting examples of suitable modifications to the RNA motif include 2′ deoxy-2-aminopurine, 2′ ribose-2-aminopurine, phosphorothioate mods, 2′-Omethyl mods, 2′-Fluro mods and LNA mods. Advantageously, the modifications help to increase stability and promote stronger bonds/folding structure of a hairpin(s) formed by the RNA motif.

[0705] In some embodiments, the RNA motif is modified to include an extension. In embodiments, the extension contains about, at least about, or no more than about 2, 3, 4, 5, 10, 15, 20, or 25 nucleotides. In some instances, the extension results in an alteration in the length of a stem formed by the RNA motif (e.g., a lengthening or a shortening). It can be advantageous for a stem formed by the RNA motif to be about, at least about, or no more than about 5, 10, 15, 20, 25, 30, 35, 40, 45, 50, 55, 60, 65, 70, 75, 80, 85, 90, 95, or 100 nucleotides in length. In various embodiments, the extension increases flexibility of the RNA motif and/or increases binding with a corresponding RNA motif.

[0706] In some embodiments, the base editor inhibits base excision repair (BER) of the edited strand. In some embodiments, the base editor protects or binds the non-edited strand. In some embodiments, the base editor comprises UGI activity. In some embodiments, the base editor comprises a catalytically inactive inosine-specific nuclease. In some embodiments, the base editor comprises nickase activity. In some embodiments, the intended edit of base pair is upstream of a PAM site. In some embodiments, the intended edit of base pair is 1, 2, 3, 4, 5, 6, 7, 8, 9, 10, 11, 12, 13, 14, 15, 16, 17, 18, 19, or 20 nucleotides upstream of the PAM site. In some embodiments, the intended edit of base-pair is downstream of a PAM site. In some embodiments, the intended edited base pair is 1, 2, 3, 4, 5, 6, 7, 8, 9, 10, 11, 12, 13, 14, 15, 16, 17, 18, 19, or 20 nucleotides downstream stream of the PAM site.

[0707] In some embodiments, the method does not require a canonical (e.g., NGG) PAM site. In some embodiments, the nucleobase editor comprises a linker or a spacer. In some embodiments, the linker or spacer is 1-25 amino acids in length. In some embodiments, the linker or spacer is 5-20 amino acids in length. In some embodiments, the linker or spacer is 10, 11, 12, 13, 14, 15, 16, 17, 18, 19, or 20 amino acids in length.

[0708] In some embodiments, the base editing fusion proteins provided herein need to be positioned at a precise location, for example, where a target base is placed within a defined region (e.g., a “deamination window”). In some embodiments, a target can be within a 4 base region. In some embodiments, such a defined target region can be approximately 15 bases upstream of the PAM. See Komor, A. C., et al., “Programmable editing of a target base in genomic DNA without double-stranded DNA cleavage” Nature 533, 420-424 (2016); Gaudelli, N. M., et al., “Programmable base editing of A•T to G•C in genomic DNA without DNA cleavage” Nature 551, 464-471 (2017); and Komor, A. C., et al., “Improved base excision repair inhibition and bacteriophage Mu Gam protein yields C:G-to-T:A base editors with higher efficiency and product purity” Science Advances 3:eaao4774 (2017), the entire contents of which are hereby incorporated by reference.

[0709] In some embodiments, the target region comprises a target window, wherein the target window comprises the target nucleobase pair. In some embodiments, the target window comprises 1-10 nucleotides. In some embodiments, the target window is 1, 2, 3, 4, 5, 6, 7, 8, 9, 10, 11, 12, 13, 14, 15, 16, 17, 18, 19, or 20 nucleotides in length. In some embodiments, the intended edit of base pair is within the target window. In some embodiments, the target window comprises the intended edit of base pair. In some embodiments, the method is performed using any of the base editors provided herein. In some embodiments, a target window is a deamination window. A deamination window can be the defined region in which a base editor acts upon and deaminates a target nucleotide. In some embodiments, the deamination window is within a 2, 3, 4, 5, 6, 7, 8, 9, or 10 base regions. In some embodiments, the deamination window is 5, 6, 7, 8, 9, 10, 11, 12, 13, 14, 15, 16, 17, 18, 19, 20, 21, 22, 23, 24, or 25 bases upstream of the PAM.

[0710] The base editors of the present disclosure can comprise any domain, feature or amino acid sequence which facilitates the editing of a target polynucleotide sequence. For example, in some embodiments, the base editor comprises a nuclear localization sequence (NLS). In some embodiments, an NLS of the base editor is localized between a deaminase domain and a polynucleotide programmable nucleotide binding domain. In some embodiments, an NLS of the base editor is localized C-terminal to a polynucleotide programmable nucleotide binding domain.

[0711] Other exemplary features that can be present in a base editor as disclosed herein are localization sequences, such as cytoplasmic localization sequences, export sequences, such as nuclear export sequences, or other localization sequences, as well as sequence tags that are useful for solubilization, purification, or detection of the fusion proteins. Suitable protein tags provided herein include, but are not limited to, biotin carboxylase carrier protein (BCCP) tags, myc-tags, calmodulin-tags, FLAG-tags, hemagglutinin (HA)-tags, polyhistidine tags, also referred to as histidine tags or His-tags, maltose binding protein (MBP)-tags, nus-tags, glutathione-S-transferase (GST)-tags, green fluorescent protein (GFP)-tags, thioredoxin-tags, S-tags, Softags (e.g., Softag 1, Softag 3), strep-tags, biotin ligase tags, FlAsH tags, V5 tags, and SBP-tags. Additional suitable sequences will be apparent to those of skill in the art. In some embodiments, the fusion protein comprises one or more His tags.

[0712] In some embodiments, non-limiting exemplary cytidine base editors (CBE) include BE1 (APOBEC1-XTEN-dCas9), BE2 (APOBEC1-XTEN-dCas9-UGI), BE3 (APOBEC1-XTEN-dCas9(A840H)-UGI), BE3-Gam, saBE3, saBE4-Gam, BE4, BE4-Gam, saBE4, or saB4E-Gam. BE4 extends the APOBEC1-Cas9n(D10A) linker to 32 amino acids and the Cas9n-UGI linker to 9 amino acids, and appends a second copy of UGI to the C-terminus of the construct with another 9-amino acid linker into a single base editor construct. The base editors saBE3 and saBE4 have the S. pyogenes Cas9n(D10A) replaced with the smaller S. aureus Cas9n(D10A). BE3-Gam, saBE3-Gam, BE4-Gam, and saBE4-Gam have 174 residues of Gam protein fused to the N-terminus of BE3, saBE3, BE4, and saBE4 via the 16 amino acid XTEN linker.

[0713] In some embodiments, the adenosine base editor (ABE) can deaminate adenine in DNA. In some embodiments, ABE is generated by replacing APOBEC1 component of BE3 with natural or engineered E. coli TadA, human ADAR2, mouse ADA, or human ADAT2. In some embodiments, ABE comprises evolved TadA variant. In some embodiments, the ABE is ABE 1.2 (TadA*-XTEN-nCas9-NLS). In some embodiments, TadA* comprises A106V and D108N mutations.

[0714] In some embodiments, the ABE is a second-generation ABE. In some embodiments, the ABE is ABE2.1, which comprises additional mutations D147Y and E155V in TadA* (TadA*2.1). In some embodiments, the ABE is ABE2.2, ABE2.1 fused to catalytically inactivated version of human alkyl adenine DNA glycosylase (AAG with E125Q mutation). In some embodiments, the ABE is ABE2.3, ABE2.1 fused to catalytically inactivated version of E. coli Endo V (inactivated with D35A mutation). In some embodiments, the ABE is ABE2.6 which has a linker twice as long (32 amino acids, (SGGS)₂ (SEQ ID NO: 334)-XTEN-(SGGS)₂ (SEQ ID NO: 334)) as the linker in ABE2.1. In some embodiments, the ABE is ABE2.7, which is ABE2.1 tethered with an additional wild-type TadA monomer. In some embodiments, the ABE is ABE2.8, which is ABE2.1 tethered with an additional TadA*2.1 monomer. In some embodiments, the ABE is ABE2.9, which is a direct fusion of evolved TadA (TadA*2.1) to the N-terminus of ABE2.1. In some embodiments, the ABE is ABE2.10, which is a direct fusion of wild-type TadA to the N-terminus of ABE2.1. In some embodiments, the ABE is ABE2.11, which is ABE2.9 with an inactivating E59A mutation at the N-terminus of TadA* monomer. In some embodiments, the ABE is ABE2.12, which is ABE2.9 with an inactivating E59A mutation in the internal TadA* monomer.

[0715] In some embodiments, the ABE is a third generation ABE. In some embodiments, the ABE is ABE3.1, which is ABE2.3 with three additional TadA mutations (L84F, H123Y, and 1156F).

[0716] In some embodiments, the ABE is a fourth generation ABE. In some embodiments, the ABE is ABE4.3, which is ABE3.1 with an additional TadA mutation A142N (TadA*4.3).

[0717] In some embodiments, the ABE is a fifth generation ABE. In some embodiments, the ABE is ABE5.1, which is generated by importing a consensus set of mutations from surviving clones (H36L, R51L, S146C, and K157N) into ABE3.1. In some embodiments, the ABE is ABE5.3, which has a heterodimeric construct containing wild-type E. coli TadA fused to an internal evolved TadA*. In some embodiments, the ABE is ABE5.2, ABE5.4, ABE5.5, ABE5.6, ABE5.7, ABE5.8, ABE5.9, ABE5.10, ABE5.11, ABE5.12, ABE5.13, or ABE5.14, as shown in Table 11 below. In some embodiments, the ABE is a sixth generation ABE. In some embodiments, the ABE is ABE6.1, ABE6.2, ABE6.3, ABE6.4, ABE6.5, or ABE6.6, as shown in Table 11 below. In some embodiments, the ABE is a seventh generation ABE. In some embodiments, the ABE is ABE7.1, ABE7.2, ABE7.3, ABE7.4, ABE7.5, ABE7.6, ABE7.7, ABE7.8, ABE 7.9, or ABE7.10, as shown in Table 11 below.

TABLE 11
Genotypes of ABEs

| | 23 | 26 | 36 | 37 | 48 | 49 | 51 | 72 | 84 | 87 | 106 | 108 | 123 | 125 | 142 | 146 | 147 | 152 | 155 | 156 | 157 | 161 |
|---|---|---|---|---|---|---|---|---|---|---|---|---|---|---|---|---|---|---|---|---|---|---|
| ABE0.1 | W | R | H | N | P | | R | N | L | S | A | D | H | G | A | S | D | R | E | I | K | K |
| ABE0.2 | W | R | H | N | P | | R | N | L | S | A | D | H | G | A | S | D | R | E | I | K | K |
| ABE1.1 | W | R | H | N | P | | R | N | L | S | A | N | H | G | A | S | D | R | E | I | K | K |
| ABE1.2 | W | R | H | N | P | | R | N | L | S | V | N | H | G | A | S | D | R | E | I | K | K |
| ABE2.1 | W | R | H | N | P | | R | N | L | S | V | N | H | G | A | S | Y | R | V | I | K | K |
| ABE2.2 | W | R | H | N | P | | R | N | L | S | V | N | H | G | A | S | Y | R | V | I | K | K |
| ABE2.3 | W | R | H | N | P | | R | N | L | S | V | N | H | G | A | S | Y | R | V | I | K | K |
| ABE2.4 | W | R | H | N | P | | R | N | L | S | V | N | H | G | A | S | Y | R | V | I | K | K |
| ABE2.5 | W | R | H | N | P | | R | N | L | S | V | N | H | G | A | S | Y | R | V | I | K | K |
| ABE2.6 | W | R | H | N | P | | R | N | L | S | V | N | H | G | A | S | Y | R | V | I | K | K |
| ABE2.7 | W | R | H | N | P | | R | N | L | S | V | N | H | G | A | S | Y | R | V | I | K | K |
| ABE2.8 | W | R | H | N | P | | R | N | L | S | V | N | H | G | A | S | Y | R | V | I | K | K |
| ABE2.9 | W | R | H | N | P | | R | N | L | S | V | N | H | G | A | S | Y | R | V | I | K | K |
| ABE2.10 | W | R | H | N | P | | R | N | L | S | V | N | H | G | A | S | Y | R | V | I | K | K |
| ABE2.11 | W | R | H | N | P | | R | N | L | S | V | N | H | G | A | S | Y | R | V | I | K | K |
| ABE2.12 | W | R | H | N | P | | R | N | L | S | V | N | H | G | A | S | Y | R | V | I | K | K |
| ABE3.1 | W | R | H | N | P | | R | N | F | S | V | N | Y | G | A | S | Y | R | V | F | K | K |
| ABE3.2 | W | R | H | N | P | | R | N | F | S | V | N | Y | G | A | S | Y | R | V | F | K | K |
| ABE3.3 | W | R | H | N | P | | R | N | F | S | V | N | Y | G | A | S | Y | R | V | F | K | K |
| ABE3.4 | W | R | H | N | P | | R | N | F | S | V | N | Y | G | A | S | Y | R | V | F | K | K |
| ABE3.5 | W | R | H | N | P | | R | N | F | S | V | N | Y | G | A | S | Y | R | V | F | K | K |
| ABE3.6 | W | R | H | N | P | | R | N | F | S | V | N | Y | G | A | S | Y | R | V | F | K | K |
| ABE3.7 | W | R | H | N | P | | R | N | F | S | V | N | Y | G | A | S | Y | R | V | F | K | K |
| ABE3.8 | W | R | H | N | P | | R | N | F | S | V | N | Y | G | A | S | Y | R | V | F | K | K |
| ABE4.1 | W | R | H | N | P | | R | N | L | S | V | N | H | G | N | S | Y | R | V | I | K | K |
| ABE4.2 | W | G | H | N | P | | R | N | L | S | V | N | H | G | N | S | Y | R | V | I | K | K |
| ABE4.3 | W | R | H | N | P | | R | N | F | S | V | N | Y | G | N | S | Y | R | V | F | K | K |
| ABE5.1 | W | R | L | N | P | | L | N | F | S | V | N | Y | G | A | C | Y | R | V | F | N | K |
| ABE5.2 | W | R | H | S | P | | R | N | F | S | V | N | Y | G | A | S | Y | R | V | F | K | T |
| ABE5.3 | W | R | L | N | P | | L | N | I | S | V | N | Y | G | A | C | Y | R | V | F | N | K |
| ABE5.4 | W | R | H | S | P | | R | N | F | S | V | N | Y | G | A | S | Y | R | V | F | K | T |
| ABE5.5 | W | R | L | N | P | | L | N | F | S | V | N | Y | G | A | C | Y | R | V | F | N | K |
| ABE5.6 | W | R | L | N | P | | L | N | F | S | V | N | Y | G | A | C | Y | R | V | F | N | K |
| ABE5.7 | W | R | L | N | P | | L | N | F | S | V | N | Y | G | A | C | Y | R | V | F | N | K |
| ABE5.8 | W | R | L | N | P | | L | N | F | S | V | N | Y | G | A | C | Y | R | V | F | N | K |
| ABE5.9 | W | R | L | N | P | | L | N | F | S | V | N | Y | G | A | C | Y | R | V | F | N | K |
| ABE5.10 | W | R | L | N | P | | L | N | F | S | V | N | Y | G | A | C | Y | R | V | F | N | K |
| ABE5.11 | W | R | L | N | P | | L | N | F | S | V | N | Y | G | A | C | Y | R | V | F | N | K |
| ABE5.12 | W | R | L | N | P | | L | N | F | S | V | N | Y | G | A | C | Y | R | V | F | N | K |
| ABE5.13 | W | R | H | N | P | | L | D | F | S | V | N | Y | A | A | S | Y | R | V | F | K | K |
| ABE5.14 | W | R | H | N | S | | L | N | F | C | V | N | Y | G | A | S | Y | R | V | F | K | K |
| ABE6.1 | W | R | H | N | S | | L | N | F | S | V | N | Y | G | N | S | Y | R | V | F | K | K |
| ABE6.2 | W | R | H | N | T | V | L | N | F | S | V | N | Y | G | N | S | Y | R | V | F | N | K |
| ABE6.3 | W | R | L | N | S | | L | N | F | S | V | N | Y | G | A | C | Y | R | V | F | N | K |
| ABE6.4 | W | R | L | N | S | | L | N | F | S | V | N | Y | G | N | C | Y | R | V | F | N | K |
| ABE6.5 | W | R | L | N | T | V | L | N | F | S | V | N | Y | G | A | C | Y | R | V | F | N | K |
| ABE6.6 | W | R | L | N | T | V | L | N | F | S | V | N | Y | G | N | C | Y | R | V | F | N | K |
| ABE7.1 | W | R | L | N | A | | L | N | F | S | V | N | Y | G | A | C | Y | R | V | F | N | K |
| ABE7.2 | W | R | L | N | A | | L | N | F | S | V | N | Y | G | N | C | Y | R | V | F | N | K |
| ABE7.3 | L | R | L | N | A | | L | N | F | S | V | N | Y | G | A | C | Y | R | V | F | N | K |
| ABE7.4 | R | R | L | N | A | | L | N | F | S | V | N | Y | G | A | C | Y | R | V | F | N | K |
| ABE7.5 | W | R | L | N | A | | L | N | F | S | V | N | Y | G | A | C | Y | H | V | F | N | K |
| ABE7.6 | W | R | L | N | A | | L | N | I | S | V | N | Y | G | A | C | Y | P | V | F | N | K |
| ABE7.7 | L | R | L | N | A | | L | N | F | S | V | N | Y | G | A | C | Y | P | V | F | N | K |
| ABE7.8 | L | R | L | N | A | | L | N | F | S | V | N | Y | G | N | C | Y | R | V | F | N | K |
| ABE7.9 | L | R | L | N | A | | L | N | F | S | V | N | Y | G | N | C | Y | P | V | F | N | K |
| ABE7.10 | R | R | L | N | A | | L | N | F | S | V | N | Y | G | A | C | Y | P | V | F | N | K |

[0718] In embodiments, the ABE8 contains a TadA*8 variant. In some embodiments, the ABE8 has a monomeric construct containing a TadA*8 variant (“ABE8.x-m”). In some embodiments, the ABE8 is ABE8.1-m, which has a monomeric construct containing TadA*7.10 with a Y147T mutation (TadA*8.1). In some embodiments, the ABE8 is ABE8.2-m, which has a monomeric construct containing TadA*7.10 with a Y147R mutation (TadA*8.2). In some embodiments, the ABE8 is ABE8.3-m, which has a monomeric construct containing TadA*7.10 with a Q154S mutation (TadA*8.3). In some embodiments, the ABE8 is ABE8.4-m, which has a monomeric construct containing TadA*7.10 with a Y123H mutation (TadA*8.4). In some embodiments, the ABE8 is ABE8.5-m, which has a monomeric construct containing TadA*7.10 with a V82S mutation (TadA*8.5). In some embodiments, the ABE8 is ABE8.6-m, which has a monomeric construct containing TadA*7.10 with a T166R mutation (TadA*8.6). In some embodiments, the ABE8 is ABE8.7-m, which has a monomeric construct containing TadA*7.10 with a Q154R mutation (TadA*8.7). In some embodiments, the ABE8 is ABE8.8-m, which has a monomeric construct containing TadA*7.10 with Y147R, Q154R, and Y123H mutations (TadA*8.8). In some embodiments, the ABE8 is ABE8.9-m, which has a monomeric construct containing TadA*7.10 with Y147R, Q154R and I76Y mutations (TadA*8.9). In some embodiments, the ABE8 is ABE8.10-m, which has a monomeric construct containing TadA*7.10 with Y147R, Q154R, and T166R mutations (TadA*8.10). In some embodiments, the ABE8 is ABE8.11-m, which has a monomeric construct containing TadA*7.10 with Y147T and Q154R mutations (TadA*8.11). In some embodiments, the ABE8 is ABE8.12-m, which has a monomeric construct containing TadA*7.10 with Y147T and Q154S mutations (TadA*8.12).

[0719] In some embodiments, the ABE8 is ABE8.13-m, which has a monomeric construct containing TadA*7.10 with Y123H (Y123H reverted from H123Y), Y147R, Q154R and I76Y mutations (TadA*8.13). In some embodiments, the ABE8 is ABE8.14-m, which has a monomeric construct containing TadA*7.10 with I76Y and V82S mutations (TadA*8.14). In some embodiments, the ABE8 is ABE8.15-m, which has a monomeric construct containing TadA*7.10 with V82S and Y147R mutations (TadA*8.15). In some embodiments, the ABE8 is ABE8.16-m, which has a monomeric construct containing TadA*7.10 with V82S, Y123H (Y123H reverted from H123Y) and Y147R mutations (TadA*8.16). In some embodiments, the ABE8 is ABE8.17-m, which has a monomeric construct containing TadA*7.10 with V82S and Q154R mutations (TadA*8.17). In some embodiments, the ABE8 is ABE8.18-m, which has a monomeric construct containing TadA*7.10 with V82S, Y123H (Y123H reverted from H123Y) and Q154R mutations (TadA*8.18). In some embodiments, the ABE8 is ABE8.19-m, which has a monomeric construct containing TadA*7.10 with V82S, Y123H (Y123H reverted from H123Y), Y147R and Q154R mutations (TadA*8.19). In some embodiments, the ABE8 is ABE8.20-m, which has a monomeric construct containing TadA*7.10 with I76Y, V82S, Y123H (Y123H reverted from H123Y), Y147R and Q154R mutations (TadA*8.20). In some embodiments, the ABE8 is ABE8.21-m, which has a monomeric construct containing TadA*7.10 with Y147R and Q154S mutations (TadA*8.21). In some embodiments, the ABE8 is ABE8.22-m, which has a monomeric construct containing TadA*7.10 with V82S and Q154S mutations (TadA*8.22). In some embodiments, the ABE8 is ABE8.23-m, which has a monomeric construct containing TadA*7.10 with V82S and Y123H (Y123H reverted from H123Y) mutations (TadA*8.23). In some embodiments, the ABE8 is ABE8.24-m, which has a monomeric construct containing TadA*7.10 with V82S, Y123H (Y123H reverted from H123Y), and Y147T mutations (TadA*8.24).

[0720] In some embodiments, the ABE8 has a heterodimeric construct containing wild-type E. coli TadA fused to a TadA*8 variant (“ABE8.x-d”). In some embodiments, the ABE8 is ABE8.1-d, which has a heterodimeric construct containing wild-type E. coli TadA fused to TadA*7.10 with aY147T mutation (TadA*8.1). In some embodiments, the ABE8 is ABE8.2-d, which has a heterodimeric construct containing wild-type E. coli TadA fused to TadA*7.10 with a Y147R mutation (TadA*8.2). In some embodiments, the ABE8 is ABE8.3-d, which has a heterodimeric construct containing wild-type E. coli TadA fused to TadA*7.10 with a Q154S mutation (TadA*8.3). In some embodiments, the ABE8 is ABE8.4-d, which has a heterodimeric construct containing wild-type E. coli TadA fused to TadA*7.10 with a Y123H mutation (TadA*8.4). In some embodiments, the ABE8 is ABE8.5-d, which has a heterodimeric construct containing wild-type E. coli TadA fused to TadA*7.10 with a V82S mutation (TadA*8.5). In some embodiments, the ABE8 is ABE8.6-d, which has a heterodimeric construct containing wild-type E. coli TadA fused to TadA*7.10 with a T166R mutation (TadA*8.6). In some embodiments, the ABE8 is ABE8.7-d, which has a heterodimeric construct containing wild-type E. coli TadA fused to TadA*7.10 with a Q154R mutation (TadA*8.7). In some embodiments, the ABE8 is ABE8.8-d, which has a heterodimeric construct containing wild-type E. coli TadA fused to TadA*7.10 with Y147R, Q154R, and Y123H mutations (TadA*8.8). In some embodiments, the ABE8 is ABE8.9-d, which has a heterodimeric construct containing wild-type E. coli TadA fused to TadA*7.10 with Y147R, Q154R and I76Y mutations (TadA*8.9). In some embodiments, the ABE8 is ABE8.10-d, which has a heterodimeric construct containing wild-type E. coli TadA fused to TadA*7.10 with Y147R, Q154R, and T166R mutations (TadA*8.10). In some embodiments, the ABE8 is ABE8.11-d, which has a heterodimeric construct containing wild-type E. coli TadA fused to TadA*7.10 with Y147T and Q154R mutations (TadA*8.11). In some embodiments, the ABE8 is ABE8.12-d, which has heterodimeric construct containing wild-type E. coli TadA fused to TadA*7.10 with Y147T and Q154S mutations (TadA*8.12). In some embodiments, the ABE8 is ABE8.13-d, which has a heterodimeric construct containing wild-type E. coli TadA fused to TadA*7.10 with Y123H (Y123H reverted from H123Y), Y147R, Q154R and I76Y mutations (TadA*8.13). In some embodiments, the ABE8 is ABE8.14-d, which has a heterodimeric construct containing wild-type E. coli TadA fused to TadA*7.10 with I76Y and V82S mutations (TadA*8.14). In some embodiments, the ABE8 is ABE8.15-d, which has a heterodimeric construct containing wild-type E. coli TadA fused to TadA*7.10 with V82S and Y147R mutations (TadA*8.15). In some embodiments, the ABE8 is ABE8.16-d, which has a heterodimeric construct containing wild-type E. coli TadA fused to TadA*7.10 with V82S, Y123H (Y123H reverted from H123Y) and Y147R mutations (TadA*8.16). In some embodiments, the ABE8 is ABE8.17-d, which has a heterodimeric construct containing wild-type E. coli TadA fused to TadA*7.10 with V82S and Q154R mutations (TadA*8.17). In some embodiments, the ABE8 is ABE8.18-d, which has a heterodimeric construct containing wild-type E. coli TadA fused to TadA*7.10 with V82S, Y123H (Y123H reverted from H123Y) and Q154R mutations (TadA*8.18). In some embodiments, the ABE8 is ABE8.19-d, which has a heterodimeric construct containing wild-type E. coli TadA fused to TadA*7.10 with V82S, Y123H (Y123H reverted from H123Y), Y147R and Q154R mutations (TadA*8.19). In some embodiments, the ABE8 is ABE8.20-d, which has a heterodimeric construct containing wild-type E. coli TadA fused to TadA*7.10 with I76Y, V82S, Y123H (Y123H reverted from H123Y), Y147R and Q154R mutations (TadA*8.20). In some embodiments, the ABE8 is ABE8.21-d, which has a heterodimeric construct containing wild-type E. coli TadA fused to TadA*7.10 with Y147R and Q154S mutations (TadA*8.21). In some embodiments, the ABE8 is ABE8.22-d, which has a heterodimeric construct containing wild-type E. coli TadA fused to TadA*7.10 with V82S and Q154S mutations (TadA*8.22). In some embodiments, the ABE8 is ABE8.23-d, which has a heterodimeric construct containing wild-type E. coli TadA fused to TadA*7.10 with V82S and Y123H (Y123H reverted from H123Y) mutations (TadA*8.23). In some embodiments, the ABE8 is ABE8.24-d, which has a heterodimeric construct containing wild-type E. coli TadA fused to TadA*7.10 with V82S, Y123H (Y123H reverted from H123Y), and Y147T mutations (TadA*8.24).

[0721] In some embodiments, the ABE8 has a heterodimeric construct containing TadA*7.10 fused to a TadA*8 variant (“ABE8.x-7”). In some embodiments, the ABE8 is ABE8.1-7, which has a heterodimeric construct containing TadA*7.10 fused to TadA*7.10 with a Y147T mutation (TadA*8.1). In some embodiments, the ABE8 is ABE8.2-7, which has a heterodimeric construct containing TadA*7.10 fused to TadA*7.10 with a Y147R mutation (TadA*8.2). In some embodiments, the ABE8 is ABE8.3-7, which has a heterodimeric construct containing TadA*7.10 fused to TadA*7.10 with a Q154S mutation (TadA*8.3). In some embodiments, the ABE8 is ABE8.4-7, which has a heterodimeric construct containing TadA*7.10 fused to TadA*7.10 with aY123H mutation (TadA*8.4). In some embodiments, the ABE8 is ABE8.5-7, which has a heterodimeric construct containing TadA*7.10 fused to TadA*7.10 with a V82S mutation (TadA*8.5). In some embodiments, the ABE8 is ABE8.6-7, which has a heterodimeric construct containing TadA*7.10 fused to TadA*7.10 with a T166R mutation (TadA*8.6). In some embodiments, the ABE8 is ABE8.7-7, which has a heterodimeric construct containing TadA*7.10 fused to TadA*7.10 with a Q154R mutation (TadA*8.7). In some embodiments, the ABE8 is ABE8.8-7, which has a heterodimeric construct containing TadA*7.10 fused to TadA*7.10 with Y147R, Q154R, and Y123H mutations (TadA*8.8). In some embodiments, the ABE8 is ABE8.9-7, which has a heterodimeric construct containing TadA*7.10 fused to TadA*7.10 with Y147R, Q154R and 176Y mutations (TadA*8.9). In some embodiments, the ABE8 is ABE8.10-7, which has a heterodimeric construct containing TadA*7.10 fused to TadA*7.10 with Y147R, Q154R, and T166R mutations (TadA*8.10). In some embodiments, the ABE8 is ABE8.11-7, which has a heterodimeric construct containing TadA*7.10 fused to TadA*7.10 with Y147T and Q154R mutations (TadA*8.11). In some embodiments, the ABE8 is ABE8.12-7, which has a heterodimeric construct containing TadA*7.10 fused to TadA*7.10 with Y147T and Q154S mutations (TadA*8.12). In some embodiments, the ABE8 is ABE8.13-7, which has a heterodimeric construct containing TadA*7.10 fused to TadA*7.10 with Y123H (Y123H reverted from H123Y), Y147R, Q154R and 176Y mutations (TadA*8.13). In some embodiments, the ABE8 is ABE8.14-7, which has a heterodimeric construct containing TadA*7.10 fused to TadA*7.10 with 176Y and V82S mutations (TadA*8.14). In some embodiments, the ABE8 is ABE8.15-7, which has a heterodimeric construct containing TadA*7.10 fused to TadA*7.10 with V82S and Y147R mutations (TadA*8.15). In some embodiments, the ABE8 is ABE8.16-7, which has a heterodimeric construct containing TadA*7.10 fused to TadA*7.10 with V82S, Y123H (Y123H reverted from H123Y) and Y147R mutations (TadA*8.16). In some embodiments, the ABE8 is ABE8.17-7, which has a heterodimeric construct containing TadA*7.10 fused to TadA*7.10 with V82S and Q154R mutations (TadA*8.17). In some embodiments, the ABE8 is ABE8.18-7, which has a heterodimeric construct containing TadA*7.10 fused to TadA*7.10 with V82S, Y123H (Y123H reverted from H123Y) and Q154R mutations (TadA*8.18). In some embodiments, the ABE8 is ABE8.19-7, which has a heterodimeric construct containing TadA*7.10 fused to TadA*7.10 with V82S, Y123H (Y123H reverted from H123Y), Y147R and Q154R mutations (TadA*8.19). In some embodiments, the ABE8 is ABE8.20-7, which has a heterodimeric construct containing TadA*7.10 fused to TadA*7.10 with I76Y, V82S, Y123H (Y123H reverted from H123Y), Y147R and Q154R mutations (TadA*8.20). In some embodiments, the ABE8 is ABE8.21-7, which has a heterodimeric construct containing TadA*7.10 fused to TadA*7.10 with Y147R and Q154S mutations (TadA*8.21). In some embodiments, the ABE8 is ABE8.22-7, which has a heterodimeric construct containing TadA*7.10 fused to TadA*7.10 with V82S and Q154S mutations (TadA*8.22). In some embodiments, the ABE8 is ABE8.23-7, which has a heterodimeric construct containing TadA*7.10 fused to TadA*7.10 with V82S and Y123H (Y123H reverted from H123Y) mutations (TadA*8.23). In some embodiments, the ABE8 is ABE8.24-7, which has a heterodimeric construct containing TadA*7.10 fused to TadA*7.10 with V82S, Y123H (Y123H reverted from H123Y), and Y147T mutations (TadA*8.24 [1] In some embodiments, the ABE is ABE8.1-m, ABE8.2-m, ABE8.3-m, ABE8.4-m, ABE8.5-m, ABE8.6-m, ABE8.7-m, ABE8.8-m, ABE8.9-m, ABE8.10-m, ABE8.11-m, ABE8.12-m, ABE8.13-m, ABE8.14-m, ABE8.15-m, ABE8.16-m, ABE8.17-m, ABE8.18-m, ABE8.19-m, ABE8.20-m, ABE8.21-m, ABE8.22-m, ABE8.23-m, ABE8.24-m, ABE8.1-d, ABE8.2-d, ABE8.3-d, ABE8.4-d, ABE8.5-d, ABE8.6-d, ABE8.7-d, ABE8.8-d, ABE8.9-d, ABE8.10-d, ABE8.11-d, ABE8.12-d, ABE8.13-d, ABE8.14-d, ABE8.15-d, ABE8.16-d, ABE8.17-d, ABE8.18-d, ABE8.19-d, ABE8.20-d, ABE8.21-d, ABE8.22-d, ABE8.23-d, or ABE8.24-d as shown in Table 12 below.

TABLE 12
Adenosine Base Editor 8 (ABE8) Variants

| ABE8 | Adenosine Deaminase | Adenosine Deaminase Description |
|---|---|---|
| ABE8.1-m | TadA*8.1 | Monomer_TadA*7.10 + Y147T |
| ABE8.2-m | TadA*8.2 | Monomer_TadA*7.10 + Y147R |
| ABE8.3-m | TadA*8.3 | Monomer_TadA*7.10 + Q154S |
| ABE8.4-m | TadA*8.4 | Monomer_TadA*7.10 + Y123H |
| ABE8.5-m | TadA*8.5 | Monomer_TadA*7.10 + V82S |
| ABE8.6-m | TadA*8.6 | Monomer_TadA*7.10 + T166R |
| ABE8.7-m | TadA*8.7 | Monomer_TadA*7.10 + Q154R |
| ABE8.8-m | TadA*8.8 | Monomer_TadA*7.10 + Y147R_Q154R_Y123H |
| ABE8.9-m | TadA*8.9 | Monomer_TadA*7.10 + Y147R_Q154R_I76Y |
| ABE8.10-m | TadA*8.10 | Monomer_TadA*7.10 + Y147R_Q154R_T166R |
| ABE8.11-m | TadA*8.11 | Monomer_TadA*7.10 + Y147T_Q154R |
| ABE8.12-m | TadA*8.12 | Monomer_TadA*7.10 + Y147T_Q154S |
| ABE8.13-m | TadA*8.13 | Monomer_TadA*7.10 + |
| | | Y123H_Y147R_Q154R_I76Y |
| ABE8.14-m | TadA*8.14 | Monomer_TadA*7.10 + I76Y_V82S |
| ABE8.15-m | TadA*8.15 | Monomer_TadA*7.10 + V82S_Y147R |
| ABE8.16-m | TadA*8.16 | Monomer_TadA*7.10 + V82S_Y123H_Y147R |
| ABE8.17-m | TadA*8.17 | Monomer_TadA*7.10 + V82S_Q154R |
| ABE8.18-m | TadA*8.18 | Monomer_TadA*7.10 + V82S_Y123H_Q154R |
| ABE8.19-m | TadA*8.19 | Monomer_TadA*7.10 + |
| | | V82S_Y123H_Y147R_Q154R |
| ABE8.20-m | TadA*8.20 | Monomer_TadA*7.10 + |
| | | I76Y_V82S_Y123H_Y147R_Q154R |
| ABE8.21-m | TadA*8.21 | Monomer_TadA*7.10 + Y147R_Q154S |
| ABE8.22-m | TadA*8.22 | Monomer_TadA*7.10 + V82S_Q154S |
| ABE8.23-m | TadA*8.23 | Monomer_TadA*7.10 + V82S_Y123H |
| ABE8.24-m | TadA*8.24 | Monomer_TadA*7.10 + V82S_Y123H_Y147T |
| ABE8.1-d | TadA*8.1 | Heterodimer_(WT) + (TadA*7.10 + Y147T) |
| ABE8.2-d | TadA*8.2 | Heterodimer_(WT) + (TadA*7.10 + Y147R) |
| ABE8.3-d | TadA*8.3 | Heterodimer_(WT) + (TadA*7.10 + Q154S) |
| ABE8.4-d | TadA*8.4 | Heterodimer_(WT) + (TadA*7.10 + Y123H) |
| ABE8.5-d | TadA*8.5 | Heterodimer_(WT) + (TadA*7.10 + V82S) |
| ABE8.6-d | TadA*8.6 | Heterodimer_(WT) + (TadA*7.10 + T166R) |
| ABE8.7-d | TadA*8.7 | Heterodimer_(WT) + (TadA*7.10 + Q154R) |
| ABE8.8-d | TadA*8.8 | Heterodimer_(WT) + (TadA*7.10 + |
| | | Y147R_Q154R_Y123H) |
| ABE8.9-d | TadA*8.9 | Heterodimer_(WT) + (TadA*7.10 + |
| | | Y147R_Q154R_I76Y) |
| ABE8.10-d | TadA*8.10 | Heterodimer_(WT) + (TadA*7.10 + |
| | | Y147R_Q154R_T166R) |
| ABE8.11-d | TadA*8.11 | Heterodimer_(WT) + (TadA*7.10 + Y147T_Q154R) |
| ABE8.12-d | TadA*8.12 | Heterodimer_(WT) + (TadA*7.10 + Y147T_Q154S) |
| ABE8.13-d | TadA*8.13 | Heterodimer_(WT) + (TadA*7.10 + |
| | | Y123H_Y147T_Q154R_I76Y) |
| ABE8.14-d | TadA*8.14 | Heterodimer_(WT) + (TadA*7.10 + I76Y_V82S) |
| ABE8.15-d | TadA*8.15 | Heterodimer_(WT) + (TadA*7.10 + V82S_Y147R) |
| ABE8.16-d | TadA*8.16 | Heterodimer_(WT) + (TadA*7.10 + |
| | | V82S_Y123H_Y147R) |
| ABE8.17-d | TadA*8.17 | Heterodimer_(WT) + (TadA*7.10 + V82S_Q154R) |
| ABE8.18-d | TadA*8.18 | Heterodimer_(WT) + (TadA*7.10 + |
| | | V82S_Y123H_Q154R) |
| ABE8.19-d | TadA*8.19 | Heterodimer_(WT) + (TadA*7.10 + |
| | | V82S_Y123H_Y147R_Q154R) |
| ABE8.20-d | TadA*8.20 | Heterodimer_(WT) + (TadA*7.10 + |
| | | I76Y_V82S_Y123H_Y147R_Q154R) |
| ABE8.21-d | TadA*8.21 | Heterodimer_(WT) + (TadA*7.10 + Y147R_Q154S) |
| ABE8.22-d | TadA*8.22 | Heterodimer_(WT) + (TadA*7.10 + V82S_Q154S) |
| ABE8.23-d | TadA*8.23 | Heterodimer_(WT) + (TadA*7.10 + V82S_Y123H) |
| ABE8.24-d | TadA*8.24 | Heterodimer_(WT) + (TadA*7.10 + |
| | | V82S_Y123H_Y147T) |

[0722] In some embodiments, the ABE8 is ABE8a-m, which has a monomeric construct containing TadA*7.10 with R26C, A109S, T111R, D119N, H122N, Y147D, F149Y, T166I, and D167N mutations (TadA*8a). In some embodiments, the ABE8 is ABE8b-m, which has a monomeric construct containing TadA*7.10 with V88A, A109S, T111R, D119N, H122N, F149Y, T166I, and D167N mutations (TadA*8b). In some embodiments, the ABE8 is ABE8c-m, which has a monomeric construct containing TadA*7.10 with R26C, A109S, T111R, D119N, H122N, F149Y, T166I, and D167N mutations (TadA*8c). In some embodiments, the ABE8 is ABE8d-m, which has a monomeric construct containing TadA*7.10 with V88A, T111R, D119N, and F149Y mutations (TadA*8d). In some embodiments, the ABE8 is ABE8e-m, which has a monomeric construct containing TadA*7.10 with A109S, T111R, D119N, H122N, Y147D, F149Y, T166I, and D167N mutations (TadA*8e).

[0723] In some embodiments, the ABE8 is ABE8a-d, which has a heterodimeric construct containing wild-type E. coli TadA fused to TadA*7.10 with R26C, A109S, T111R, D119, H122N, Y147D, F149Y, T166I, and D167N mutations (TadA*8a). In some embodiments, the ABE8 is ABE8b-d, which has a heterodimeric construct containing wild-type E. coli TadA fused to TadA*7.10 with V88A, A109S, T111R, D119N, H122N, F149Y, T166I, and D167N mutations (TadA*8b). In some embodiments, the ABE8 is ABE8c-d, which has a heterodimeric construct containing wild-type E. coli TadA fused to TadA*7.10 with R26C, A109S, T111R, D119N, H122N, F149Y, T166I, and D167N mutations (TadA*8c). In some embodiments, the ABE8 is ABE8d-d, which has a heterodimeric construct containing wild-type E. coli TadA fused to TadA*7.10 with V88A, T111R, D119N, and F149Y mutations (TadA*8d). In some embodiments, the ABE8 is ABE8e-d, which has a heterodimeric construct containing wild-type E. coli TadA fused to TadA*7.10 with A109S, T111R, D119N, H122N, Y147D, F149Y, T166I, and D167N mutations (TadA*8e).

[0724] In some embodiments, the ABE8 is ABE8a-7, which has a heterodimeric construct containing TadA*7.10 fused to TadA*7.10 with R26C, A109S, T111R, D119, H122N, Y147D, F149Y, T166I, and D167N mutations (TadA*8a). In some embodiments, the ABE8 is ABE8b-7, which has a heterodimeric construct containing TadA*7.10 fused to TadA*7.10 with V88A, A109S, T111R, D119N, H122N, F149Y, T166I, and D167N mutations (TadA*8b). In some embodiments, the ABE8 is ABE8c-7, which has a heterodimeric construct containing TadA*7.10 fused to TadA*7.10 with R26C, A109S, T111R, D119N, H122N, F149Y, T166I, and D167N mutations (TadA*8c). In some embodiments, the ABE8 is ABE8d-7, which has a heterodimeric construct containing TadA*7.10 fused to TadA*7.10 with V88A, T11+R, D119N, and F+49Y mutations (TadA*8d). In some embodiments, the ABE8 is ABE8e-7, which has a heterodimeric construct containing TadA*7.10 fused to TadA*7.10 with A109S, T111R, D119N, H122N, YH47D, F149Y, T166I, and D167N mutations (TadA*8e).

In some embodiments, the ABE is ABE8a-m, ABE8b-m, ABE8c-m, ABE8d-m, ABE8e-m, ABE8a-d, ABE8b-d, ABE8c-d, ABE8d-d, or ABE8e-d, as shown in Table 13 below. In some embodiments, the ABE is ABE8e-m or ABE8e-d. ABE8e shows efficient adenine base editing activity and low indel formation when used with Cas homologues other than SpCas9, for example, SaCas9, SaCas9-KKH, Cas12a homologues, e.g., LbCas12a, enAs-Cas12a, SpCas9-NG and circularly permuted CP1028-SpCas9 and CP1041-SpCas9. In addition to the mutations shown for ABE8e in Table 13, off-target RNA and DNA editing were reduced by introducing a V806W substitution into the TadA domain (as described in M. Richter et al., 2020, Nature Biotechnology, doi.org/i0.1038/s41587-020-0453-z, the entire contents of which are incorporated by reference herein).

TABLE 13
Additional Adenosine Base Editor 8 Variants. In the table, “monomer”
indicates an ABE comprising a single TadA*7.10 comprising the indicated alterations
and “heterodimer” indicates an ABE comprising a TadA*7.10 comprising
the indicated alterations fused to an E. coli TadA adenosine deaminase.

| ABE8 Base | Adenosine | |
|---|---|---|
| Editor | Deaminase | Adenosine Deaminase Description |
| ABE8a-m | TadA*8a | Monomer_TadA*7.10 + R26C + A109S + T111R + D119N + |
| | | H122N + Y147D + F149Y + T166I + D167N |
| ABE8b-m | TadA*8b | Monomer_TadA*7.10 + V88A + A109S + T111R + D119N + |
| | | H122N + F149Y + T166I + D167N |
| ABE8c-m | TadA*8c | Monomer_TadA*7.10 + R26C + A109S + T111R + D119N + |
| | | H122N + F149Y + T166I + D167N |
| ABE8d-m | TadA*8d | Monomer_TadA*7.10 + V88A + T111R + D119N + F149Y |
| ABE8e-m | TadA*8e | Monomer_TadA*7.10 + A109S + T111R + D119N + H122N + |
| | | Y147D + F149Y + T166I + D167N |
| ABE8a-d | TadA*8a | Heterodimer_(WT) + (TadA*7.10 + R26C + A109S + T111R + |
| | | D119N + H122N + Y147D + F149Y + T166I + D167N) |
| ABE8b-d | TadA*8b | Heterodimer_(WT) + (TadA*7.10 + V88A + A109S + T111R + |
| | | D119N + H122N + F149Y + T166I + D167N) |
| ABE8c-d | TadA*8c | Heterodimer_(WT) + (TadA*7.10 + R26C + A109S + T111R + |
| | | D119N + H122N + F149Y + T166I + D167N) |
| ABE8d-d | TadA*8d | Heterodimer_(WT) + (TadA*7.10 + V88A + T111R + D119N + |
| | | F149Y) |
| ABE8e-d | TadA*8e | Heterodimer_(WT) + (TadA*7.10 + A109S + T111R + |
| | | D119N + H122N + Y147D + F149Y + T166I + D167N) |

[0725] In some embodiments, base editors (e.g., ABE8) are generated by cloning an adenosine deaminase variant (e.g., TadA*8) into a scaffold that includes a circular permutant Cas9 (e.g., CP5 or CP6) and a bipartite nuclear localization sequence. In some embodiments, the base editor (e.g., ABE7.9, ABE7.10, or ABE8) is an NGC PAM CP5 variant (S. pyogenes Cas9 or spVRQR Cas9). In some embodiments, the base editor (e.g., ABE7.9, ABE7.10, or ABE8) is an AGA PAM CP5 variant (S. pyogenes Cas9 or spVRQR Cas9). In some embodiments, the base editor (e.g., ABE7.9, ABE7.10, or ABE8) is an NGC PAM CP6 variant (S. pyogenes Cas9 or spVRQR Cas9). In some embodiments, the base editor (e.g. ABE7.9, ABE7.10, or ABE8) is an AGA PAM CP6 variant (S. pyogenes Cas9 or spVRQR Cas9).

[0726] In some embodiments, the ABE has a genotype as shown in Table 14 below.

TABLE 14
Genotypes of ABEs

| | 23 | 26 | 36 | 37 | 48 | 49 | 51 | 72 | 84 | 87 | 105 | 108 | 123 | 125 | 142 | 145 | 147 | 152 | 155 | 156 | 157 | 161 |
|---|---|---|---|---|---|---|---|---|---|---|---|---|---|---|---|---|---|---|---|---|---|---|
| ABE7.9 | L | R | L | N | A | | L | N | F | S | V | N | Y | G | N | C | Y | P | V | F | N | K |
| ABE7.10 | R | R | L | N | A | | L | N | F | S | V | N | Y | G | A | C | Y | P | V | F | N | K |

As shown in Table 11 below, genotypes of 40 ABE8s are described. Residue positions in the evolved E. coli TadA portion of ABE are indicated. Mutational changes in ABE8 are shown when distinct from ABE7.10 mutations. In some embodiments, the ABE has a genotype of one of the ABEs as shown in Table 15 below.

TABLE 15
Residue Identity in Evolved TadA

| | 23 | 36 | 48 | 51 | 76 | 82 | 84 | 106 | 108 | 123 | 146 | 147 | 152 | 154 | 155 | 156 | 157 | 166 |
|---|---|---|---|---|---|---|---|---|---|---|---|---|---|---|---|---|---|---|
| ABE7.10 | R | L | A | L | I | V | F | V | N | Y | C | Y | P | Q | V | F | N | T |
| ABE8.1-m | | | | | | | | | | | | T | | | | | | |
| ABE8.2-m | | | | | | | | | | | | R | | | | | | |
| ABE8.3-m | | | | | | | | | | | | | | S | | | | |
| ABE8.4-m | | | | | | | | | | H | | | | | | | | |
| ABE8.5-m | | | | | | S | | | | | | | | | | | | |
| ABE8.6-m | | | | | | | | | | | | | | | | | | R |
| ABE8.7-m | | | | | | | | | | | | | | R | | | | |
| ABE8.8-m | | | | | | | | | | H | | R | | R | | | | |
| ABE8.9-m | | | | | Y | | | | | | | R | | R | | | | |
| ABE8.10-m | | | | | | | | | | | | R | | R | | | | R |
| ABE8.11-m | | | | | | | | | | | | T | | R | | | | |
| ABE8.12-m | | | | | | | | | | | | T | | S | | | | |
| ABE8.13-m | | | | | Y | | | | | H | | R | | R | | | | |
| ABE8.14-m | | | | | Y | S | | | | | | | | | | | | |
| ABE8.15-m | | | | | | S | | | | | | R | | | | | | |
| ABE8.16-m | | | | | | S | | | | H | | R | | | | | | |
| ABE8.17-m | | | | | | S | | | | | | | | R | | | | |
| ABE8.18-m | | | | | | S | | | | H | | | | R | | | | |
| ABE8.19-m | | | | | | S | | | | H | | R | | R | | | | |
| ABE8.20-m | | | | | Y | S | | | | H | | R | | R | | | | |
| ABE8.21-m | | | | | | | | | | | | R | | S | | | | |
| ABE8.22-m | | | | | | S | | | | | | | | S | | | | |
| ABE8.23-m | | | | | | S | | | | H | | | | | | | | |
| ABE8.24-m | | | | | | S | | | | H | | T | | | | | | |
| ABE8.1-d | | | | | | | | | | | | T | | | | | | |
| ABE8.2-d | | | | | | | | | | | | R | | | | | | |
| ABE8.3-d | | | | | | | | | | | | | | S | | | | |
| ABE8.4-d | | | | | | | | | | H | | | | | | | | |
| ABE8.5-d | | | | | | S | | | | | | | | | | | | |
| ABE8.6-d | | | | | | | | | | | | | | | | | | R |
| ABE8.7-d | | | | | | | | | | | | | | R | | | | |
| ABE8.8-d | | | | | | | | | | H | | R | | R | | | | |
| ABE8.9-d | | | | | Y | | | | | | | R | | R | | | | |
| ABE8.10-d | | | | | | | | | | | | R | | R | | | | R |
| ABE8.11-d | | | | | | | | | | | | T | | R | | | | |
| ABE8.12-d | | | | | | | | | | | | T | | S | | | | |
| ABE8.13-d | | | | | Y | | | | | H | | R | | R | | | | |
| ABE8.14-d | | | | | Y | S | | | | | | | | | | | | |
| ABE8.15-d | | | | | | S | | | | | | R | | | | | | |
| ABE8.16-d | | | | | | S | | | | H | | R | | | | | | |
| ABE8.17-d | | | | | | S | | | | | | | | R | | | | |
| ABE8.18-d | | | | | | S | | | | H | | | | R | | | | |
| ABE8.19-d | | | | | | S | | | | H | | R | | R | | | | |
| ABE8.20-d | | | | | Y | S | | | | H | | R | | R | | | | |
| ABE8.21-d | | | | | | | | | | | | R | | S | | | | |
| ABE8.22-d | | | | | | S | | | | | | | | S | | | | |
| ABE8.23-d | | | | | | S | | | | H | | | | | | | | |
| ABE8.24-d | | | | | | S | | | | H | | T | | | | | | |

[0727] In some embodiments, the base editor is ABE8.1, which comprises or consists essentially of the following sequence or a fragment thereof having adenosine deaminase activity:

ABE8.1_Y147T_CP5_NGC PAM_monomer
(SEQ ID NO: 335)
MSEVEFSHEYWMRHALTLAKRARDEREVPVGAVLVLNNRVIGEGWNRAIG
LHDPTAHAEIMALRQGGLVMQNYRLIDATLYVTFEPCVMCAGAMIHSRIG
RVVFGVRNAKTGAAGSLMDVLHYPGMNHRVEITEGILADECAALLCTFFR
MPRQVFNAQKKAQSSTDSGGSSGGSSGSETPGTSESATPESSGGSSGGSE
IGKATAKYFFYSNIMNFFKTEITLANGEIRKRPLIETNGETGEIVWDKGR
DFATVRKVLSMPQVNIVKKTEVQTGGFSKESILPKRNSDKLIARKKDWDP
KKYGGFMQPTVAYSVLVVAKVEKGKSKKLKSVKELLGITIMERSSFEKNP
IDFLEAKGYKEVKKDLIIKLPKYSLFELENGRKRMLASAKFLQKGNELAL
PSKYVNFLYLASHYEKLKGSPEDNEQKQLFVEQHKHYLDEIIEQISEFSK
RVILADANLDKVLSAYNKHRDKPIREQAENIIHLFTLTNLGAPRAFKYFD
TTIARKEYRSTKEVLDATLIHQSITGLYETRIDLSQLGGDGGSGGSGGSG
GSGGSGGSGGMDKKYSIGLAIGTNSVGWAVITDEYKVPSKKFKVLGNTDR
HSIKKNLIGALLFDSGETAEATRLKRTARRRYTRRKNRICYLQEIFSNEM
AKVDDSFFHRLEESFLVEEDKKHERHPIFGNIVDEVAYHEKYPTIYHLRK
KLVDSTDKADLRLIYLALAHMIKFRGHFLIEGDLNPDNSDVDKLFIQLVQ
TYNQLFEENPINASGVDAKAILSARLSKSRRLENLIAQLPGEKKNGLFGN
LIALSLGLTPNFKSNFDLAEDAKLQLSKDTYDDDLDNLLAQIGDQYADLF
LAAKNLSDAILLSDILRVNTEITKAPLSASMIKRYDEHHQDLTLLKALVR
QQLPEKYKEIFFDQSKNGYAGYIDGGASQEEFYKFIKPILEKMDGTEELL
VKLNREDLLRKQRTFDNGSIPHQIHLGELHAILRRQEDFYPFLKDNREKI
EKILTFRIPYYVGPLARGNSRFAWMTRKSEETITPWNFEEVVDKGASAQS
FIERMTNFDKNLPNEKVLPKHSLLYEYFTVYNELTKVKYVTEGMRKPAFL
SGEQKKAIVDLLFKTNRKVTVKQLKEDYFKKIECFDSVEISGVEDRENAS
LGTYHDLLKIIKDKDFLDNEENEDILEDIVLTLTLFEDREMIEERLKTYA
HLFDDKVMKQLKRRRYTGWGRLSRKLINGIRDKQSGKTILDFLKSDGFAN
RNFMQLIHDDSLTFKEDIQKAQVSGQGDSLHEHIANLAGSPAIKKGILQT
VKVVDELVKVMGRHKPENIVIEMARENQTTQKGQKNSRERMKRIEEGIKE
LGSQILKEHPVENTQLQNEKLYLYYLQNGRDMYVDQELDINRLSDYDVDH
IVPQSFLKDDSIDNKVLTRSDKNRGKSDNVPSEEVVKKMKNYWRQLLNAK
LITQRKFDNLTKAERGGLSELDKAGFIKRQLVETRQITKHVAQILDSRMN
TKYDENDKLIREVKVITLKSKLVSDFRKDFQFYKVREINNYHHAHDAYLN
AVVGTALIKKYPKLESEFVYGDYKVYDVRKMIAKSEQEGADKRTADGSEF
ESPKKKRKV

[0728] In the above sequence, the plain text denotes an adenosine deaminase sequence, bold sequence indicates sequence derived from Cas9, the italicized sequence denotes a linker sequence, and the underlined sequence denotes a bipartite nuclear localization sequence. Other ABE8 sequences are provided in the attached sequence listing (SEQ ID NOs: 336-358).

[0729] In some embodiments, the base editor is a ninth generation ABE (ABE9). In some embodiments, the ABE9 contains a TadA*9 variant. ABE9 base editors include an adenosine deaminase variant comprising an amino acid sequence, which contains alterations relative to an ABE 7*10 reference sequence, as described herein. Exemplary ABE9 variants are listed in Table 16. Details of ABE9 base editors are described in International PCT Application No. PCT/2020/049975, which is incorporated herein by reference for its entirety.

TABLE 16
Adenosine Base Editor 9 (ABE9) Variants. In the table, “monomer”
indicates an ABE comprising a single TadA*7.10 comprising
the indicated alterations and “heterodimer” indicates
an ABE comprising a TadA*7.10 comprising the indicated alterations
fused to an E. coli TadA adenosine deaminase.

| ABE9 Description | Alterations |
|---|---|
| ABE9.1_monomer | E25F, V82S, Y123H, T133K, Y147R, Q154R |
| ABE9.2_monomer | E25F, V82S, Y123H, Y147R, Q154R |
| ABE9.3_monomer | V82S, Y123H, P124W, Y147R, Q154R |
| ABE9.4_monomer | L51W, V82S, Y123H, C146R, Y147R, Q154R |
| ABE9.5_monomer | P54C, V82S, Y123H, Y147R, Q154R |
| ABE9.6_monomer | Y73S, V82S, Y123H, Y147R, Q154R |
| ABE9.7_monomer | N38G, V82T, Y123H, Y147R, Q154R |
| ABE9.8_monomer | R23H, V82S, Y123H, Y147R, Q154R |
| ABE9.9_monomer | R21N, V82S, Y123H, Y147R, Q154R |
| ABE9.10_monomer | V82S, Y123H, Y147R, Q154R, A158K |
| ABE9.11_monomer | N72K, V82S, Y123H, D139L, Y147R, Q154R, |
| ABE9.12_monomer | E25F, V82S, Y123H, D139M, Y147R, Q154R |
| ABE9.13_monomer | M70V, V82S, M94V, Y123H, Y147R, Q154R |
| ABE9.14_monomer | Q71M, V82S, Y123H, Y147R, Q154R |
| ABE9.15_heterodimer | E25F, V82S, Y123H, T133K, Y147R, Q154R |
| ABE9.16_heterodimer | E25F, V82S, Y123H, Y147R, Q154R |
| ABE9.17_heterodimer | V82S, Y123H, P124W, Y147R, Q154R |
| ABE9.18_heterodimer | L51W, V82S, Y123H, C146R, Y147R, Q154R |
| ABE9.19_heterodimer | P54C, V82S, Y123H, Y147R, Q154R |
| ABE9.2_heterodimer | Y73S, V82S, Y123H, Y147R, Q154R |
| ABE9.21_heterodimer | N38G, V82T, Y123H, Y147R, Q154R |
| ABE9.22_heterodimer | R23H, V82S, Y123H, Y147R, Q154R |
| ABE9.23_heterodimer | R21N, V82S, Y123H, Y147R, Q154R |
| ABE9.24_heterodimer | V82S, Y123H, Y147R, Q154R, A158K |
| ABE9.25_heterodimer | N72K, V82S, Y123H, D139L, Y147R, Q154R, |
| ABE9.26_heterodimer | E25F, V82S, Y123H, D139M, Y147R, Q154R |
| ABE9.27_heterodimer | M70V, V82S, M94V, Y123H, Y147R, Q154R |
| ABE9.28_heterodimer | Q71M, V82S, Y123H, Y147R, Q154R |
| ABE9.29_monomer | E25F_I76Y_V82S_Y123H_Y147R_Q154R |
| ABE9.30_monomer | I76Y_V82T_Y123H_Y147R_Q154R |
| ABE9.31_monomer | N38G_I76Y_V82S_Y123H_Y147R_Q154R |
| ABE9.32_monomer | N38G_I76Y_V82T_Y123H_Y147R_Q154R |
| ABE9.33_monomer | R23H_I76Y_V82S_Y123H_Y147R_Q154R |
| ABE9.34_monomer | P54C_I76Y_V82S_Y123H_Y147R_Q154R |
| ABE9.35_monomer | R21N_I76Y_V82S_Y123H_Y147R_Q154R |
| ABE9.36_monomer | I76Y_V82S_Y123H_D138M_Y147R_Q154R |
| ABE9.37_monomer | Y72S_I76Y_V82S_Y123H_Y147R_Q154R |
| ABE9.38_heterodimer | E25F_I76Y_V82S_Y123H_Y147R_Q154R |
| ABE9.39_heterodimer | I76Y_V82T_Y123H_Y147R_Q154R |
| ABE9.40_heterodimer | N38G_I76Y_V82S_Y123H_Y147R_Q154R |
| ABE9.41_heterodimer | N38G_I76Y_V82T_Y123H_Y147R_Q154R |
| ABE9.42_heterodimer | R23H_I76Y_V82S_Y123H_Y147R_Q154R |
| ABE9.43_heterodimer | P54C_I76Y_V82S_Y123H_Y147R_Q154R |
| ABE9.44_heterodimer | R21N_176Y_V82S_Y123H_Y147R_Q154R |
| ABE9.45_heterodimer | I76Y_V82S_Y123H_D138M_Y147R_Q154R |
| ABE9.46_heterodimer | Y72S_I76Y_V82S_Y123H_Y147R_Q154R |
| ABE9.47_monomer | N72K_V82S, Y123H, Y147R, Q154R |
| ABE9.48_monomer | Q71M_V82S, Y123H, Y147R, Q154R |
| ABE9.49_monomer | M70V, V82S, M94V, Y123H, Y147R, Q154R |
| ABE9.50_monomer | V82S, Y123H, T133K, Y147R, Q154R |
| ABE9.51_monomer | V82S, Y123H, T133K, Y147R, Q154R, |
| | A158K |
| ABE9.52_monomer | M70V, Q71M, N72K, V82S, Y123H, Y147R, |
| | Q154R |
| ABE9.53_heterodimer | N72K_V82S, Y123H, Y147R, Q154R |
| ABE9.54_heterodimer | Q71M_V82S, Y123H, Y147R, Q154R |
| ABE9.55_heterodimer | M70V, V82S, M94V, Y123H, Y147R, Q154R |
| ABE9.56_heterodimer | V82S, Y123H, T133K, Y147R, Q154R |
| ABE9.57_heterodimer | V82S, Y123H, T133K, Y147R, Q154R, |
| | A158K |
| ABE9.58_heterodimer | M70V, Q71M, N72K, V82S, Y123H, Y147R, |
| | Q154R |

[0730] In some embodiments, the base editor includes an adenosine deaminase variant comprising an amino acid sequence, which contains alterations relative to an ABE 7*10 reference sequence, as described herein. The term “monomer” as used in Table 16.1 refers to a monomeric form of TadA*7.10 comprising the alterations described. The term “heterodimer” as used in Table 16.1 refers to the specified wild-type E. coli TadA adenosine deaminase fused to a TadA*7.10 comprising the alterations as described.

TABLE 16.1
Adenosine Deaminase Base Editor Variants

| | Adenosine | |
|---|---|---|
| ABE | Deaminase | Adenosine Deaminase Description |
| ABE-605m | MSP605 | monomer_TadA*7.10 + V82G + Y147T + Q154S |
| ABE-680m | MSP680 | monomer_TadA*7.10 + I76Y + V82G + Y147T + Q154S |
| ABE-823m | MSP823 | monomer_TadA*7.10 + L36H + V82G + Y147T + Q154S + |
| | | N157K |
| ABE-824m | MSP824 | monomer_TadA*7.10 + V82G + Y147D + F149Y + Q154S + |
| | | D167N |
| ABE-825m | MSP825 | monomer_TadA*7.10 + L36H + V82G + Y147D + F149Y + |
| | | Q154S + N157K + D167N |
| ABE-827m | MSP827 | monomer_TadA*7.10 + L36H + I76Y + V82G + Y147T + |
| | | Q154S + N157K |
| ABE-828m | MSP828 | monomer_TadA*7.10 + I76Y + V82G + Y147D + F149Y + |
| | | Q154S + D167N |
| ABE-829m | MSP829 | monomer_TadA*7.10 + L36H + I76Y + V82G + Y147D + |
| | | F149Y + Q154S + N157K + D167N |
| ABE-605d | MSP605 | heterodimer_(WT) + (TadA*7.10 + V82G + Y147T + Q154S) |
| ABE-680d | MSP680 | heterodimer_(WT) + (TadA*7.10 + 176Y + V82G + Y147T + |
| | | Q154S) |
| ABE-823d | MSP823 | heterodimer_(WT) + (TadA*7.10 + L36H + V82G + Y147T + |
| | | Q154S + N157K) |
| ABE-824d | MSP824 | heterodimer_(WT) + (TadA*7.10 + V82G + Y147D + F149Y + |
| | | Q154S + D167N) |
| ABE-825d | MSP825 | heterodimer_(WT) + (TadA*7.10 + L36H + V82G + Y147D + |
| | | F149Y + Q154S + N157K + D167N) |
| ABE-827d | MSP827 | heterodimer_(WT) + (TadA*7.10 + L36H + I76Y + V82G + |
| | | Y147T + Q154S + N157K) |
| ABE-828d | MSP828 | heterodimer_(WT) + (TadA*7.10 + I76Y + V82G + Y147D + |
| | | F149Y + Q154S + D167N) |
| ABE-829d | MSP829 | heterodimer_(WT) + (TadA*7.10 + L36H + I76Y + V82G + |
| | | Y147D + F149Y + Q154S + N157K + D167N) |

[0731] In some embodiments, the base editor comprises a domain comprising all or a portion of a uracil glycosylase inhibitor (UGI). In some embodiments, the base editor comprises a domain comprising all or a portion of a nucleic acid polymerase. In some embodiments, a base editor can comprise as a domain all or a portion of a nucleic acid polymerase (NAP). For example, a base editor can comprise all or a portion of a eukaryotic NAP. In some embodiments, a NAP or portion thereof incorporated into a base editor is a DNA polymerase. In some embodiments, a NAP or portion thereof incorporated into a base editor has translesion polymerase activity. In some embodiments, a NAP or portion thereof incorporated into a base editor is a translesion DNA polymerase. In some embodiments, a NAP or portion thereof incorporated into a base editor is a Rev7, Rev1 complex, polymerase iota, polymerase kappa, or polymerase eta. In some embodiments, a NAP or portion thereof incorporated into a base editor is a eukaryotic polymerase alpha, beta, gamma, delta, epsilon, gamma, eta, iota, kappa, lambda, mu, or nu component. In some embodiments, a NAP or portion thereof incorporated into a base editor comprises an amino acid sequence that is at least 75%, 80%, 85%, 90%, 95%, 96%, 97%, 98%, 99%, or 99.5% identical to a nucleic acid polymerase (e.g., a translesion DNA polymerase). In some embodiments, a nucleic acid polymerase or portion thereof incorporated into a base editor is a translesion DNA polymerase.

[0732] In some embodiments, a domain of the base editor can comprise multiple domains. For example, the base editor comprising a polynucleotide programmable nucleotide binding domain derived from Cas9 can comprise a REC lobe and an NUC lobe corresponding to the REC lobe and NUC lobe of a wild-type or natural Cas9. In another example, the base editor can comprise one or more of a RuvCI domain, BH domain, REC1 domain, REC2 domain, RuvCII domain, L1 domain, HNH domain, L2 domain, RuvCIII domain, WED domain, TOPO domain or CTD domain. In some embodiments, one or more domains of the base editor comprise a mutation (e.g., substitution, insertion, deletion) relative to a wild-type version of a polypeptide comprising the domain. For example, an HNH domain of a polynucleotide programmable DNA binding domain can comprise an H840A substitution. In another example, a RuvCI domain of a polynucleotide programmable DNA binding domain can comprise a D10A substitution.

[0733] Different domains (e.g., adjacent domains) of the base editor disclosed herein can be connected to each other with or without the use of one or more linker domains (e.g., an XTEN linker domain). In some embodiments, a linker domain can be a bond (e.g., covalent bond), chemical group, or a molecule linking two molecules or moieties, e.g., two domains of a fusion protein, such as, for example, a first domain (e.g., Cas9-derived domain) and a second domain (e.g., an adenosine deaminase domain or a cytidine deaminase domain). In some embodiments, a linker is a covalent bond (e.g., a carbon-carbon bond, disulfide bond, carbon-hetero atom bond, etc.). In certain embodiments, a linker is a carbon nitrogen bond of an amide linkage. In certain embodiments, a linker is a cyclic or acyclic, substituted or unsubstituted, branched or unbranched aliphatic or heteroaliphatic linker. In certain embodiments, a linker is polymeric (e.g., polyethylene, polyethylene glycol, polyamide, polyester, etc.). In certain embodiments, a linker comprises a monomer, dimer, or polymer of aminoalkanoic acid. In some embodiments, a linker comprises an aminoalkanoic acid (e.g., glycine, ethanoic acid, alanine, beta-alanine, 3-aminopropanoic acid, 4-aminobutanoic acid, 5-pentanoic acid, etc.). In some embodiments, a linker comprises a monomer, dimer, or polymer of aminohexanoic acid (Ahx). In certain embodiments, a linker is based on a carbocyclic moiety (e.g., cyclopentane, cyclohexane). In other embodiments, a linker comprises a polyethylene glycol moiety (PEG). In certain embodiments, a linker comprises an aryl or heteroaryl moiety. In certain embodiments, the linker is based on a phenyl ring. A linker can include functionalized moieties to facilitate attachment of a nucleophile (e.g., thiol, amino) from the peptide to the linker. Any electrophile can be used as part of the linker. Exemplary electrophiles include, but are not limited to, activated esters, activated amides, Michael acceptors, alkyl halides, aryl halides, acyl halides, and isothiocyanates. In some embodiments, a linker joins a gRNA binding domain of an RNA-programmable nuclease, including a Cas9 nuclease domain, and the catalytic domain of a nucleic acid editing protein. In some embodiments, a linker joins a dCas9 and a second domain (e.g., UGI, etc.).

### Linkers

[0734] In certain embodiments, linkers may be used to link any of the peptides or peptide domains of the invention. The linker may be as simple as a covalent bond, or it may be a polymeric linker many atoms in length. In certain embodiments, the linker is a polypeptide or based on amino acids. In other embodiments, the linker is not peptide-like. In certain embodiments, the linker is a covalent bond (e.g., a carbon-carbon bond, disulfide bond, carbon-heteroatom bond, etc.). In certain embodiments, the linker is a carbon-nitrogen bond of an amide linkage. In certain embodiments, the linker is a cyclic or acyclic, substituted or unsubstituted, branched or unbranched aliphatic or heteroaliphatic linker. In certain embodiments, the linker is polymeric (e.g., polyethylene, polyethylene glycol, polyamide, polyester, etc.). In certain embodiments, the linker comprises a monomer, dimer, or polymer of aminoalkanoic acid. In certain embodiments, the linker comprises an aminoalkanoic acid (e.g., glycine, ethanoic acid, alanine, beta-alanine, 3-aminopropanoic acid, 4-aminobutanoic acid, 5-pentanoic acid, etc.). In certain embodiments, the linker comprises a monomer, dimer, or polymer of aminohexanoic acid (Ahx). In certain embodiments, the linker is based on a carbocyclic moiety (e.g., cyclopentane, cyclohexane). In other embodiments, the linker comprises a polyethylene glycol moiety (PEG). In other embodiments, the linker comprises amino acids. In certain embodiments, the linker comprises a peptide. In certain embodiments, the linker comprises an aryl or heteroaryl moiety. In certain embodiments, the linker is based on a phenyl ring. The linker may include functionalized moieties to facilitate attachment of a nucleophile (e.g., thiol, amino) from the peptide to the linker. Any electrophile may be used as part of the linker. Exemplary electrophiles include, but are not limited to, activated esters, activated amides, Michael acceptors, alkyl halides, aryl halides, acyl halides, and isothiocyanates.

[0735] Typically, a linker is positioned between, or flanked by, two groups, molecules, or other moieties and connected to each one via a covalent bond, thus connecting the two. In some embodiments, a linker is an amino acid or a plurality of amino acids (e.g., a peptide or protein). In some embodiments, a linker is an organic molecule, group, polymer, or chemical moiety. In some embodiments, a linker is 2-100 amino acids in length, for example, 2, 3, 4, 5, 6, 7, 8, 9, 10, 11, 12, 13, 14, 15, 16, 17, 18, 19, 20, 21, 22, 23, 24, 25, 26, 27, 28, 29, 30, 30-35, 35-40, 40-45, 45-50, 50-60, 60-70, 70-80, 80-90, 90-100, 100-150, or 150-200 amino acids in length. In some embodiments, the linker is about 3 to about 104 (e.g., 5, 6, 7, 8, 9, 10, 11, 12, 13, 14, 15, 16, 17, 18, 19, 20, 21, 22, 23, 24, 25, 26, 27, 28, 29, 30, 31, 32, 33, 34, 35, 36, 37, 38, 39, 40, 41, 42, 43, 44, 45, 46, 47, 48, 49, 50, 55, 60, 65, 70, 75, 80, 85, 90, 95, or 100) amino acids in length. Longer or shorter linkers are also contemplated.

[0736] In some embodiments, any of the fusion proteins provided herein, comprise a cytidine or adenosine deaminase and a Cas9 domain that are fused to each other via a linker. Various linker lengths and flexibilities between the cytidine or adenosine deaminase and the Cas9 domain can be employed (e.g., ranging from very flexible linkers of the form (GGGS)n (SEQ ID NO: 250), (GGGGS)n (SEQ ID NO: 251), and (G)n to more rigid linkers of the form (EAAAK)n (SEQ ID NO: 252), (SGGS)n (SEQ ID NO: 359), SGSETPGTSESATPES (SEQ ID NO: 253) (see, e.g., Guilinger J P, et al. Fusion of catalytically inactive Cas9 to FokI nuclease improves the specificity of genome modification. Nat. Biotechnol. 2014; 32(6): 577-82; the entire contents are incorporated herein by reference) and (XP)n) in order to achieve the optimal length for activity for the cytidine or adenosine deaminase nucleobase editor. In some embodiments, n is 1, 2, 3, 4, 5, 6, 7, 8, 9, 10, 11, 12, 13, 14, or 15. In some embodiments, the linker comprises a (GGS)n motif, wherein n is 1, 3, or 7. In some embodiments, cytidine deaminase or adenosine deaminase and the Cas9 domain of any of the fusion proteins provided herein are fused via a linker comprising the amino acid sequence SGSETPGTSESATPES (SEQ ID NO: 253), which can also be referred to as the XTEN linker.

[0737] In some embodiments, the domains of the base editor are fused via a linker that comprises the amino acid sequence of:

(SEQ ID NO: 361)
SGGSSGSETPGTSESATPESSGGS,
(SEQ ID NO: 362)
SGGSSGGSSGSETPGTSESATPESSGGSSGGS,
or
(SEQ ID NO: 362)
GGSGGSPGSPAGSPTSTEEGTSESATPESGPGTSTEPSEGSAPGSPA
GSPTSTEEGTSTEPSEGSAPGTSTEPSEGSAPGTSESATPESGPGSE
PATSGGSGGS.

[0738] In some embodiments, domains of the base editor are fused via a linker comprising the amino acid sequence SGSETPGTSESATPES (SEQ ID NO: 253), which may also be referred to as the XTEN linker. In some embodiments, a linker comprises the amino acid sequence SGGS. In some embodiments, the linker is 24 amino acids in length. In some embodiments, the linker comprises the amino acid sequence SGGSSGGSSGSETPGTSESATPES (SEQ ID NO: 363). In some embodiments, the linker is 40 amino acids in length. In some embodiments, the linker comprises the amino acid sequence: SGGSSGGSSGSETPGTSESATPESSGGSSGGSSGGSSGGS (SEQ ID NO: 364). In some embodiments, the linker is 64 amino acids in length. In some embodiments, the linker comprises the amino acid sequence: SGGSSGGSSGSETPGTSESATPESSGGSSGGSSGGSSGGSSGSETPGTSESATPESSGGSSGGS (SEQ ID NO: 365). In some embodiments, the linker is 92 amino acids in length. In some embodiments, the linker comprises the amino acid sequence:

(SEQ ID NO: 366)
PGSPAGSPTSTEEGTSESATPESGPGTSTEPSEGSAPGSPAGSPTST
EEGTSTEPSEGSAPGTSTEPSEGSAPGTSESATPESGPGSEPATS.

[0739] In some embodiments, a linker comprises a plurality of proline residues and is 5-21, 5-14, 5-9, 5-7 amino acids in length, e.g., PAPAP (SEQ ID NO: 367), PAPAPA (SEQ ID NO: 368), PAPAPAP (SEQ ID NO: 369), PAPAPAPA (SEQ ID NO: 370), P(AP)4 (SEQ ID NO: 371), P(AP)7 (SEQ ID NO: 372), P(AP)10 (SEQ ID NO: 373) (see, e.g., Tan J, Zhang F, Karcher D, Bock R. Engineering of high-precision base editors for site-specific single nucleotide replacement. Nat Commun. 2019 Jan. 25; 10(1):439; the entire contents are incorporated herein by reference). Such proline-rich linkers are also termed “rigid” linkers.

[0740] In another embodiment, the base editor system comprises a component (protein) that interacts non-covalently with a deaminase (DNA deaminase), e.g., an adenosine or a cytidine deaminase, and transiently attracts the adenosine or cytidine deaminase to the target nucleobase in a target polynucleotide sequence for specific editing, with minimal or reduced bystander or target-adjacent effects. Such a non-covalent system and method involving deaminase-interacting proteins serves to attract a DNA deaminase to a particular genomic target nucleobase and decouples the events of on-target and target-adjacent editing, thus enhancing the achievement of more precise single base substitution mutations. In an embodiment, the deaminase-interacting protein binds to the deaminase (e.g., adenosine deaminase or cytidine deaminase) without blocking or interfering with the active (catalytic) site of the deaminase from engaging the target nucleobase (e.g., adenosine or cytidine, respectively). Such as system, termed “MagnEdit,” involves interacting proteins tethered to a Cas9 and gRNA complex and can attract a co-expressed adenosine or cytidine deaminase (either exogenous or endogenous) to edit a specific genomic target site, and is described in McCann, J. et al., 2020, “MagnEdit—interacting factors that recruit DNA-editing enzymes to single base targets,” Life-Science-Alliance, Vol. 3, No. 4 (e201900606), (doi 10.26508/Isa.201900606), the contents of which are incorporated by reference herein in their entirety. In an embodiment, the DNA deaminase is an adenosine deaminase variant (e.g., TadA*8) as described herein.

[0741] In another embodiment, a system called “Suntag,” involves non-covalently interacting components used for recruiting protein (e.g., adenosine deaminase or cytidine deaminase) components, or multiple copies thereof, of base editors to polynucleotide target sites to achieve base editing at the site with reduced adjacent target editing, for example, as described in Tanenbaum, M. E. et al., “A protein tagging system for signal amplification in gene expression and fluorescence imaging,” Cell. 2014 Oct. 23; 159(3): 635-646. doi:10.1016/j.cell.2014.09.039; and in Huang, Y.-H. et al., 2017, “DNA epigenome editing using CRISPR-Cas SunTag-directed DNMT3A,” Genome Biol 18: 176. doi:10.1186/s13059-017-1306-z, the contents of each of which are incorporated by reference herein in their entirety. In an embodiment, the DNA deaminase is an adenosine deaminase variant (e.g., TadA*8) as described herein.

Nucleic Acid Programmable DNA Binding Proteins with Guide RNAs

[0742] Provided herein are compositions and methods for base editing in cells. Further provided herein are compositions comprising a guide polynucleic acid sequence, e.g. a guide RNA sequence, or a combination of 2, 3, 4, 5, 6, 7, 8, 9, 10, 11, 12, 13, 14, 15, 16, 17, 18, 19, 20, or more guide RNAs as provided herein. In some embodiments, a composition for base editing as provided herein further comprises a polynucleotide that encodes a base editor, e.g. a C-base editor or an A-base editor. For example, a composition for base editing may comprise a mRNA sequence encoding a BE, a BE4, an ABE, and a combination of one or more guide RNAs as provided. A composition for base editing may comprise a base editor polypeptide and a combination of one or more of any guide RNAs provided herein. Such a composition may be used to effect base editing in a cell through different delivery approaches, for example, electroporation, nucleofection, viral transduction or transfection. In some embodiments, the composition for base editing comprises an mRNA sequence that encodes a base editor and a combination of one or more guide RNA sequences provided herein for electroporation.

[0743] Some aspects of this disclosure provide complexes comprising any of the fusion proteins provided herein, and a guide RNA bound to a nucleic acid programmable DNA binding protein (napDNAbp) domain (e.g., a Cas9 (e.g., a dCas9, a nuclease active Cas9, or a Cas9 nickase) or Cas12) of the fusion protein. These complexes are also termed ribonucleoproteins (RNPs). In some embodiments, the guide nucleic acid (e.g., guide RNA) is from 15-100 nucleotides long and comprises a sequence of at least 10 contiguous nucleotides that is complementary to a target sequence. In some embodiments, the guide RNA is 15, 16, 17, 18, 19, 20, 21, 22, 23, 24, 25, 26, 27, 28, 29, 30, 31, 32, 33, 34, 35, 36, 37, 38, 39, 40, 41, 42, 43, 44, 45, 46, 47, 48, 49, or 50 nucleotides long. In some embodiments, the guide RNA comprises a sequence of 15, 16, 17, 18, 19, 20, 21, 22, 23, 24, 25, 26, 27, 28, 29, 30, 31, 32, 33, 34, 35, 36, 37, 38, 39, or40 contiguous nucleotides that is complementary to a target sequence. In some embodiments, the target sequence is a DNA sequence. In some embodiments, the target sequence is an RNA sequence. In some embodiments, the target sequence is a sequence in the genome of a bacteria, yeast, fungi, insect, plant, or animal. In some embodiments, the target sequence is a sequence in the genome of a human. In some embodiments, the 3′ end of the target sequence is immediately adjacent to a canonical PAM sequence (NGG). In some embodiments, the 3′ end of the target sequence is immediately adjacent to a non-canonical PAM sequence (e.g., a sequence listed in Table 7 or 5′-NAA-3′). In some embodiments, the guide nucleic acid (e.g., guide RNA) is complementary to a sequence in a gene of interest (e.g., a gene associated with a disease or disorder).

[0744] Some aspects of this disclosure provide methods of using the fusion proteins, or complexes provided herein. For example, some aspects of this disclosure provide methods comprising contacting a DNA molecule with any of the fusion proteins provided herein, and with at least one guide RNA, wherein the guide RNA is about 15-100 nucleotides long and comprises a sequence of at least 10 contiguous nucleotides that is complementary to a target sequence. In some embodiments, the 3′ end of the target sequence is immediately adjacent to an AGC, GAG, TTT, GTG, or CAA sequence. In some embodiments, the 3′ end of the target sequence is immediately adjacent to an NGA, NGCG, NGN, NNGRRT, NNNRRT, NGCG, NGCN, NGTN, NGTN, NGTN, or 5′ (TTTV) sequence. In some embodiments, the 3′ end of the target sequence is immediately adjacent to an e.g., TTN, DTTN, GTTN, ATTN, ATTC, DTTNT, WTTN, HATY, TTTN, TTTV, TTTC, TG, RTR, or YTN PAM site.

[0745] It will be understood that the numbering of the specific positions or residues in the respective sequences depends on the particular protein and numbering scheme used. Numbering might differ, e.g., in precursors of a mature protein and the mature protein itself, and differences in sequences from species to species may affect numbering. One of skill in the art will be able to identify the respective residue in any homologous protein and in the respective encoding nucleic acid by methods well known in the art, e.g., by sequence alignment and determination of homologous residues.

[0746] It will be apparent to those of skill in the art that in order to target any of the fusion proteins disclosed herein, to a target site, e.g., a site comprising a mutation to be edited, it is typically necessary to co-express the fusion protein together with a guide RNA. As explained in more detail elsewhere herein, a guide RNA typically comprises a tracrRNA framework allowing for napDNAbp (e.g., Cas9 or Cas12) binding, and a guide sequence, which confers sequence specificity to the napDNAbp:nucleic acid editing enzyme/domain fusion protein. Alternatively, the guide RNA and tracrRNA may be provided separately, as two nucleic acid molecules. In some embodiments, the guide RNA comprises a structure, wherein the guide sequence comprises a sequence that is complementary to the target sequence. The guide sequence is typically 20 nucleotides long. The sequences of suitable guide RNAs for targeting napDNAbp:nucleic acid editing enzyme/domain fusion proteins to specific genomic target sites will be apparent to those of skill in the art based on the instant disclosure. Such suitable guide RNA sequences typically comprise guide sequences that are complementary to a nucleic sequence within 50 nucleotides upstream or downstream of the target nucleotide to be edited. Some exemplary guide RNA sequences suitable for targeting any of the provided fusion proteins to specific target sequences are provided herein.

[0747] Distinct portions of sgRNA are predicted to form various features that interact with Cas9 (e.g., SpyCas9) and/or the DNA target. Six conserved modules have been identified within native crRNA:tracrRNA duplexes and single guide RNAs (sgRNAs) that direct Cas9 endonuclease activity (see Briner et al., Guide RNA Functional Modules Direct Cas9 Activity and Orthogonality Mol Cell. 2014 Oct. 23; 56(2):333-339). The six modules include the spacer responsible for DNA targeting, the upper stem, bulge, lower stem formed by the CRISPR repeat:tracrRNA duplex, the nexus, and hairpins from the 3′ end of the tracrRNA. The upper and lower stems interact with Cas9 mainly through sequence-independent interactions with the phosphate backbone. In some embodiments, the upper stem is dispensable. In some embodiments, the conserved uracil nucleotide sequence at the base of the lower stem is dispensable. The bulge participates in specific side-chain interactions with the Rec domain of Cas9. The nucleobase of U44 interacts with the side chains of Tyr 325 and His 328, while G43 interacts with Tyr 329. The nexus forms the core of the sgRNA:Cas9 interactions and lies at the intersection between the sgRNA and both Cas9 and the target DNA. The nucleobases of A51 and A52 interact with the side chain of Phe 1105; U56 interacts with Arg 457 and Asn 459; the nucleobase of U59 inserts into a hydrophobic pocket defined by side chains of Arg 74, Asn 77, Pro 475, Leu 455, Phe 446, and Ile 448; C60 interacts with Leu 455, Ala 456, and Asn 459, and C61 interacts with the side chain of Arg 70, which in turn interacts with C15. In some embodiments, one or more of these mutations are made in the bulge and/or the nexus of a sgRNA for a Cas9 (e.g., spyCas9) to optimize sgRNA:Cas9 interactions.

[0748] Moreover, the tracrRNA nexus and hairpins are critical for Cas9 pairing and can be swapped to cross orthogonality barriers separating disparate Cas9 proteins, which is instrumental for further harnessing of orthogonal Cas9 proteins. In some embodiments, the nexus and hairpins are swapped to target orthogonal Cas9 proteins. In some embodiments, a sgRNA is dispensed of the upper stem, hairpin 1, and/or the sequence flexibility of the lower stem to design a guide RNA that is more compact and conformationally stable. In some embodiments, the modules are modified to optimize multiplex editing using a single Cas9 with various chimeric guides or by concurrently using orthogonal systems with different combinations of chimeric sgRNAs. Details regarding guide functional modules and methods thereof are described, for example, in Briner et al., Guide RNA Functional Modules Direct Cas9 Activity and Orthogonality Mol Cell. 2014 Oct. 23; 56(2):333-339, the contents of which is incorporated by reference herein in its entirety.

[0749] The domains of the base editor disclosed herein can be arranged in any order. Non-limiting examples of a base editor comprising a fusion protein comprising e.g., a polynucleotide-programmable nucleotide-binding domain (e.g., Cas9 or Cas12) and a deaminase domain (e.g., cytidine or adenosine deaminase) can be arranged as follows:
[0750] NH2-[nucleobase editing domain]-Linker1-[nucleobase editing domain]-COOH;
[0751] NH2-[deaminase]-Linker1-[nucleobase editing domain]-COOH;
[0752] NH2-[deaminase]-Linker1-[nucleobase editing domain]-Linker2-[UGI]-COOH;
[0753] NH2-[deaminase]-Linker1-[nucleobase editing domain]-COOH;
[0754] NH2-[adenosine deaminase]-Linker1-[nucleobase editing domain]-COOH;
[0755] NH2-[nucleobase editing domain]-[deaminase]-COOH;
[0756] NH2-[deaminase]-[nucleobase editing domain]-[inosine BER inhibitor]-COOH;
[0757] NH2-[deaminase]-[inosine BER inhibitor]-[nucleobase editing domain]-COOH;
[0758] NH2-[inosine BER inhibitor]-[deaminase]-[nucleobase editing domain]-COOH;
[0759] NH2-[nucleobase editing domain]-[deaminase]-[inosine BER inhibitor]-COOH;
[0760] NH2-[nucleobase editing domain]-[inosine BER inhibitor]-[deaminase]-COOH;
[0761] NH2-[inosine BER inhibitor]-[nucleobase editing domain]-[deaminase]-COOH;
[0762] NH2-[nucleobase editing domain]-Linker1-[deaminase]-Linker2-[nucleobase editing domain]-COOH;
[0763] NH2-[nucleobase editing domain]-Linker1-[deaminase]-[nucleobase editing domain]-COOH;
[0764] NH2-[nucleobase editing domain]-[deaminase]-Linker2-[nucleobase editing domain]-COOH;
[0765] NH2-[nucleobase editing domain]-[deaminase]-[nucleobase editing domain]-COOH;
[0766] NH2-[nucleobase editing domain]-Linker1-[deaminase]-Linker2-[nucleobase editing domain]-[inosine BER inhibitor]-COOH;
[0767] NH2-[nucleobase editing domain]-Linker1-[deaminase]-[nucleobase editing domain]-[inosine BER inhibitor]-COOH;
[0768] NH2-[nucleobase editing domain]-[deaminase]-Linker2-[nucleobase editing domain]-[inosine BER inhibitor]-COOH;
[0769] NH2-[nucleobase editing domain]-[deaminase]-[nucleobase editing domain]-[inosine BER inhibitor]-COOH;
[0770] NH2-[inosine BER inhibitor]-[nucleobase editing domain]-Linker1-[deaminase]-Linker2-[nucleobase editing domain]-COOH;
[0771] NH2-[inosine BER inhibitor]-[nucleobase editing domain]-Linker1-[deaminase]-[nucleobase editing domain]-COOH;
[0772] NH2-[inosine BER inhibitor]-[nucleobase editing domain]-[deaminase]-Linker2-[nucleobase editing domain]-COOH; or
[0773] NH2-[inosine BER inhibitor]NH2-[nucleobase editing domain]-[deaminase]-[nucleobase editing domain]-COOH.

[0774] In some embodiments, the base editing fusion proteins provided herein need to be positioned at a precise location, for example, where a target base is placed within a defined region (e.g., a “deamination window”). In some embodiments, a target can be within a 4-base region. In some embodiments, such a defined target region can be approximately 15 bases upstream of the PAM. See Komor, A. C., et al., “Programmable editing of a target base in genomic DNA without double-stranded DNA cleavage” Nature 533, 420-424 (2016); Gaudelli, N. M., et al., “Programmable base editing of A•T to G•C in genomic DNA without DNA cleavage” Nature 551, 464-471 (2017); and Komor, A. C., et al., “Improved base excision repair inhibition and bacteriophage Mu Gam protein yields C:G-to-T:A base editors with higher efficiency and product purity” Science Advances 3:eaao4774 (2017), the entire contents of which are hereby incorporated by reference.

[0775] A defined target region can be a deamination window. A deamination window can be the defined region in which a base editor acts upon and deaminates a target nucleotide. In some embodiments, the deamination window is within a 2, 3, 4, 5, 6, 7, 8, 9, or 10 base regions. In some embodiments, the deamination window is 5, 6, 7, 8, 9, 10, 11, 12, 13, 14, 15, 16, 17, 18, 19, 20, 21, 22, 23, 24, or 25 bases upstream of the PAM.

[0776] The base editors of the present disclosure can comprise any domain, feature or amino acid sequence which facilitates the editing of a target polynucleotide sequence. For example, in some embodiments, the base editor comprises a nuclear localization sequence (NLS). In some embodiments, an NLS of the base editor is localized between a deaminase domain and a napDNAbp domain. In some embodiments, an NLS of the base editor is localized C-terminal to a napDNAbp domain.

[0777] Non-limiting examples of protein domains which can be included in the fusion protein include a deaminase domain (e.g., adenosine deaminase or cytidine deaminase), a uracil glycosylase inhibitor (UGI) domain, epitope tags, reporter gene sequences, and/or protein domains having one or more of the activities described herein.

[0778] A domain may be detected or labeled with an epitope tag, a reporter protein, other binding domains. Non-limiting examples of epitope tags include histidine (His) tags, V5 tags, FLAG tags, influenza hemagglutinin (HA) tags, Myc tags, VSV-G tags, and thioredoxin (Trx) tags. Examples of reporter genes include, but are not limited to, glutathione-5-transferase (GST), horseradish peroxidase (HRP), chloramphenicol acetyltransferase (CAT) beta-galactosidase, beta-glucuronidase, luciferase, green fluorescent protein (GFP), HcRed, DsRed, cyan fluorescent protein (CFP), yellow fluorescent protein (YFP), and autofluorescent proteins including blue fluorescent protein (BFP). Additional protein sequences can include amino acid sequences that bind DNA molecules or bind other cellular molecules, including but not limited to maltose binding protein (MBP), S-tag, Lex A DNA binding domain (DBD) fusions, GAL4 DNA binding domain fusions, and herpes simplex virus (HSV) BP16 protein fusions.

### Methods of Using Fusion Proteins Comprising a Cytidine or Adenosine Deaminase and a Cas9 Domain

[0779] Some aspects of this disclosure provide methods of using the fusion proteins, or complexes provided herein. For example, some aspects of this disclosure provide methods comprising contacting a DNA molecule with any of the fusion proteins provided herein, and with at least one guide RNA described herein.

[0780] In some embodiments, a fusion protein of the invention is used for editing a target gene of interest. In particular, a cytidine deaminase or adenosine deaminase nucleobase editor described herein is capable of making multiple mutations within a target sequence. These mutations may affect the function of the target. For example, when a cytidine deaminase or adenosine deaminase nucleobase editor is used to target a regulatory region the function of the regulatory region is altered and the expression of the downstream protein is reduced or eliminated.

[0781] It will be understood that the numbering of the specific positions or residues in the respective sequences depends on the particular protein and numbering scheme used. Numbering might be different, e.g., in precursors of a mature protein and the mature protein itself, and differences in sequences from species to species may affect numbering. One of skill in the art will be able to identify the respective residue in any homologous protein and in the respective encoding nucleic acid by methods well known in the art, e.g., by sequence alignment and determination of homologous residues.

[0782] It will be apparent to those of skill in the art that in order to target any of the fusion proteins comprising a Cas9 domain and a cytidine or adenosine deaminase, as disclosed herein, to a target site, e.g., a site comprising a mutation to be edited, it is typically necessary to co-express the fusion protein together with a guide RNA, e.g., an sgRNA. As explained in more detail elsewhere herein, a guide RNA typically comprises a tracrRNA framework allowing for Cas9 binding, and a guide sequence, which confers sequence specificity to the Cas9:nucleic acid editing enzyme/domain fusion protein. Alternatively, the guide RNA and tracrRNA may be provided separately, as two nucleic acid molecules. In some embodiments, the guide RNA comprises a structure, wherein the guide sequence comprises a sequence that is complementary to the target sequence. The guide sequence is typically 20 nucleotides long. The sequences of suitable guide RNAs for targeting Cas9:nucleic acid editing enzyme/domain fusion proteins to specific genomic target sites will be apparent to those of skill in the art based on the instant disclosure. Such suitable guide RNA sequences typically comprise guide sequences that are complementary to a nucleic sequence within 50 nucleotides upstream or downstream of the target nucleotide to be edited. Some exemplary guide RNA sequences suitable for targeting any of the provided fusion proteins to specific target sequences are provided herein.

### Base Editor Efficiency

[0783] In some embodiments, the purpose of the methods provided herein is to alter a gene and/or gene product via gene editing. The nucleobase editing proteins provided herein can be used for gene editing-based human therapeutics in vitro or in vivo. It will be understood by the skilled artisan that the nucleobase editing proteins provided herein, e.g., the fusion proteins comprising a polynucleotide programmable nucleotide binding domain (e.g., Cas9) and a nucleobase editing domain (e.g., an adenosine deaminase domain or a cytidine deaminase domain) can be used to edit a nucleotide from A to G or C to T.

[0784] Advantageously, base editing systems as provided herein provide genome editing without generating double-strand DNA breaks, without requiring a donor DNA template, and without inducing an excess of stochastic insertions and deletions as CRISPR may do. In some embodiments, the present disclosure provides base editors that efficiently generate an intended mutation, such as a STOP codon, in a nucleic acid (e.g., a nucleic acid within a genome of a subject) without generating a significant number of unintended mutations, such as unintended point mutations. In some embodiments, an intended mutation is a mutation that is generated by a specific base editor (e.g., adenosine base editor or cytidine base editor) bound to a guide polynucleotide (e.g., gRNA), specifically designed to generate the intended mutation. In some embodiments, the intended mutation is in a gene associated with a target antigen associated with a disease or disorder, e.g., an amyloid disease such as cardiomyopathy, familial amyloid polyneuropathy (FAP), familial amyloid cardiomyopathy (FAC), familial transthyretin amyloidosis (FTA), senile systemic amyloidosis (SSA), transthyretin amyloidosis, and the like. In some embodiments, the intended mutation is an adenine (A) to guanine (G) point mutation (e.g., SNP) in a gene associated with a target antigen associated with a disease or disorder, e.g., an amyloid disease such as cardiomyopathy, familial amyloid polyneuropathy (FAP), familial amyloid cardiomyopathy (FAC), familial transthyretin amyloidosis (FTA), senile systemic amyloidosis (SSA), transthyretin amyloidosis, and the like. In some embodiments, the intended mutation is an adenine (A) to guanine (G) point mutation within the coding region or non-coding region of a gene (e.g., regulatory region or element). In some embodiments, the intended mutation is a cytosine (C) to thymine (T) point mutation (e.g., SNP) in a gene associated with a target antigen associated with a disease or disorder, e.g., an amyloid disease such as cardiomyopathy, familial amyloid polyneuropathy (FAP), familial amyloid cardiomyopathy (FAC), familial transthyretin amyloidosis (FTA), senile systemic amyloidosis (SSA), transthyretin amyloidosis, and the like. In some embodiments, the intended mutation is a cytosine (C) to thymine (T) point mutation within the coding region or non-coding region of a gene (e.g., regulatory region or element). In some embodiments, the intended mutation is a point mutation that generates a STOP codon, for example, a premature STOP codon within the coding region of a gene. In some embodiments, the intended mutation is a mutation that eliminates a stop codon.

[0785] The base editors of the invention advantageously modify a specific nucleotide base encoding a protein without generating a significant proportion of indels. An “indel”, as used herein, refers to the insertion or deletion of a nucleotide base within a nucleic acid. Such insertions or deletions can lead to frame shift mutations within a coding region of a gene. In some embodiments, it is desirable to generate base editors that efficiently modify (e.g. mutate) a specific nucleotide within a nucleic acid, without generating a large number of insertions or deletions (i.e., indels) in the nucleic acid. In some embodiments, it is desirable to generate base editors that efficiently modify (e.g. mutate or methylate) a specific nucleotide within a nucleic acid, without generating a large number of insertions or deletions (i.e., indels) in the nucleic acid. In certain embodiments, any of the base editors provided herein can generate a greater proportion of intended modifications (e.g., methylations) versus indels. In certain embodiments, any of the base editors provided herein can generate a greater proportion of intended modifications (e.g., mutations) versus indels.

[0786] In some embodiments, the base editors provided herein are capable of generating a ratio of intended mutations to indels (i.e., intended point mutations:unintended point mutations) that is greater than 1:1. In some embodiments, the base editors provided herein are capable of generating a ratio of intended mutations to indels that is at least 1.5:1, at least 2:1, at least 2.5:1, at least 3:1, at least 3.5:1, at least 4:1, at least 4.5:1, at least 5:1, at least 5.5:1, at least 6:1, at least 6.5:1, at least 7:1, at least 7.5:1, at least 8:1, at least 10:1, at least 12:1, at least 15:1, at least 20:1, at least 25:1, at least 30:1, at least 40:1, at least 50:1, at least 100:1, at least 200:1, at least 300:1, at least 400:1, at least 500:1, at least 600:1, at least 700:1, at least 800:1, at least 900:1, or at least 1000:1, or more. The number of intended mutations and indels may be determined using any suitable method.

[0787] In some embodiments, the base editors provided herein can limit formation of indels in a region of a nucleic acid. In some embodiments, the region is at a nucleotide targeted by a base editor or a region within 2, 3, 4, 5, 6, 7, 8, 9, or 10 nucleotides of a nucleotide targeted by a base editor. In some embodiments, any of the base editors provided herein can limit the formation of indels at a region of a nucleic acid to less than 1%, less than 1.5%, less than 2%, less than 2.5%, less than 3%, less than 3.5%, less than 4%, less than 4.5%, less than 5%, less than 6%, less than 7%, less than 8%, less than 9%, less than 10%, less than 12%, less than 15%, or less than 20%. The number of indels formed at a nucleic acid region may depend on the amount of time a nucleic acid (e.g., a nucleic acid within the genome of a cell) is exposed to a base editor. In some embodiments, a number or proportion of indels is determined after at least 1 hour, at least 2 hours, at least 6 hours, at least 12 hours, at least 24 hours, at least 36 hours, at least 48 hours, at least 3 days, at least 4 days, at least 5 days, at least 7 days, at least 10 days, or at least 14 days of exposing a nucleic acid (e.g., a nucleic acid within the genome of a cell) to a base editor.

[0788] Some aspects of the disclosure are based on the recognition that any of the base editors provided herein are capable of efficiently generating an intended mutation in a nucleic acid (e.g. a nucleic acid within a genome of a subject) without generating a considerable number of unintended mutations (e.g., spurious off-target editing or bystander editing). In some embodiments, an intended mutation is a mutation that is generated by a specific base editor bound to a gRNA, specifically designed to generate the intended mutation. In some embodiments, the intended mutation is a mutation that generates a stop codon, for example, a premature stop codon within the coding region of a gene. In some embodiments, the intended mutation is a mutation that eliminates a stop codon. In some embodiments, the intended mutation is a mutation that alters the splicing of a gene. In some embodiments, the intended mutation is a mutation that alters the regulatory sequence of a gene (e.g., a gene promotor or gene repressor). In some embodiments, any of the base editors provided herein are capable of generating a ratio of intended mutations to unintended mutations (e.g., intended mutations:unintended mutations) that is greater than 1:1. In some embodiments, any of the base editors provided herein are capable of generating a ratio of intended mutations to unintended mutations that is at least 1.5:1, at least 2:1, at least 2.5:1, at least 3:1, at least 3.5:1, at least 4:1, at least 4.5:1, at least 5:1, at least 5.5:1, at least 6:1, at least 6.5:1, at least 7:1, at least 7.5:1, at least 8:1, at least 10:1, at least 12:1, at least 15:1, at least 20:1, at least 25:1, at least 30:1, at least 40:1, at least 50:1, at least 100:1, at least 150:1, at least 200:1, at least 250:1, at least 500:1, or at least 1000:1, or more. It should be appreciated that the characteristics of the base editors described herein may be applied to any of the fusion proteins, or methods of using the fusion proteins provided herein.

[0789] Base editing is often referred to as a “modification”, such as, a genetic modification, a gene modification and modification of the nucleic acid sequence and is clearly understandable based on the context that the modification is a base editing modification. A base editing modification is therefore a modification at the nucleotide base level, for example as a result of the deaminase activity discussed throughout the disclosure, which then results in a change in the gene sequence, and may affect the gene product. In essence therefore, the gene editing modification described herein may result in a modification of the gene, structurally and/or functionally, wherein the expression of the gene product may be modified, for example, the expression of the gene is knocked out; or conversely, enhanced, or, in some circumstances, the gene function or activity may be modified. Using the methods disclosed herein, a base editing efficiency may be determined as the knockdown efficiency of the gene in which the base editing is performed, wherein the base editing is intended to knockdown the expression of the gene. A knockdown level may be validated quantitatively by determining the expression level by any detection assay, such as assay for protein expression level, for example, by flow cytometry; assay for detecting RNA expression such as quantitative RT-PCR, northern blot analysis, or any other suitable assay such as pyrosequencing; and may be validated qualitatively by nucleotide sequencing reactions.

[0790] In some embodiments, the modification, e.g., single base edit results in at least 10% reduction of the gene targeted expression. In some embodiments, the base editing efficiency may result in at least 10% reduction of the gene targeted expression. In some embodiments, the base editing efficiency may result in at least 20% reduction of the gene targeted expression. In some embodiments, the base editing efficiency may result in at least 30% reduction of the gene targeted expression. In some embodiments, the base editing efficiency may result in at least 40% reduction of the gene targeted expression. In some embodiments, the base editing efficiency may result in at least 50% reduction of the gene targeted expression. In some embodiments, the base editing efficiency may result in at least 60% reduction of the targeted gene expression. In some embodiments, the base editing efficiency may result in at least 70% reduction of the targeted gene expression. In some embodiments, the base editing efficiency may result in at least 80% reduction of the targeted gene expression. In some embodiments, the base editing efficiency may result in at least 90% reduction of the targeted gene expression. In some embodiments, the base editing efficiency may result in at least 91% reduction of the targeted gene expression. In some embodiments, the base editing efficiency may result in at least 92% reduction of the targeted gene expression. In some embodiments, the base editing efficiency may result in at least 93% reduction of the targeted gene expression. In some embodiments, the base editing efficiency may result in at least 94% reduction of the targeted gene expression. In some embodiments, the base editing efficiency may result in at least 95% reduction of the targeted gene expression. In some embodiments, the base editing efficiency may result in at least 96% reduction of the targeted gene expression. In some embodiments, the base editing efficiency may result in at least 97% reduction of the targeted gene expression. In some embodiments, the base editing efficiency may result in at least 98% reduction of the targeted gene expression. In some embodiments, the base editing efficiency may result in at least 99% reduction of the targeted gene expression. In some embodiments, the base editing efficiency may result in knockout (100% knockdown of the gene expression) of the gene that is targeted.

[0791] In some embodiments, any of the base editor systems provided herein result in less than 50%, less than 40%, less than 30%, less than 20%, less than 19%, less than 18%, less than 17%, less than 16%, less than 15%, less than 14%, less than 13%, less than 12%, less than 11%, less than 10%, less than 9%, less than 8%, less than 7%, less than 6%, less than 5%, less than 4%, less than 3%, less than 2%, less than 1%, less than 0.9%, less than 0.8%, less than 0.7%, less than 0.6%, less than 0.5%, less than 0.4%, less than 0.3%, less than 0.2%, less than 0.1%, less than 0.09%, less than 0.08%, less than 0.07%, less than 0.06%, less than 0.05%, less than 0.04%, less than 0.03%, less than 0.02%, or less than 0.01% indel formation in the target polynucleotide sequence.

[0792] In some embodiments, targeted modifications, e.g., single base editing, are used simultaneously to target at least 4, 5, 6, 7, 8, 9, 10, 11, 12 13, 14, 15, 16, 17, 18, 19, 20, 21, 22, 23, 24, 25, 26, 27, 28, 29, 30, 31, 32, 33, 34, 35, 36, 37, 38, 39, 40, 41, 42, 43, 44, 45, 46, 47, 48, 49 or 50 different endogenous sequences for base editing with different guide RNAs. In some embodiments, targeted modifications, e.g. single base editing, are used to sequentially target at least 4, 5, 6, 7, 8, 9, 10, 11, 12 13, 14, 15, 16, 17, 18, 19, 20, 21, 22, 23, 24, 25, 26, 27, 28, 29, 30, 31, 32, 33, 34, 35, 36, 37, 38, 39, 40, 41, 42, 43, 44, 45, 46, 47, 48, 49 50, or more different endogenous gene sequences for base editing with different guide RNAs.

[0793] Some aspects of the disclosure are based on the recognition that any of the base editors provided herein are capable of efficiently generating an intended mutation, such as a point mutation, in a nucleic acid (e.g., a nucleic acid within a genome of a subject) without generating a significant number of unintended mutations, such as unintended point mutations (i.e., mutation of bystanders). In some embodiments, any of the base editors provided herein are capable of generating at least 0.01% of intended mutations (i.e., at least 0.01% base editing efficiency). In some embodiments, any of the base editors provided herein are capable of generating at least 0.01%, 1%, 2%, 3%, 4%, 5%, 10%, 15%, 20%, 25%, 30%, 40%, 45%, 50%, 60%, 70%, 80%, 90%, 95%, or 99% of intended mutations.

[0794] In some embodiments, any of the base editor systems comprising one of the ABE8 base editor variants described herein result in less than 50%, less than 40%, less than 30%, less than 20%, less than 19%, less than 18%, less than 17%, less than 16%, less than 15%, less than 14%, less than 13%, less than 12%, less than 11%, less than 10%, less than 9%, less than 8%, less than 7%, less than 6%, less than 5%, less than 4%, less than 3%, less than 2%, less than 1%, less than 0.9%, less than 0.8%, less than 0.7%, less than 0.6%, less than 0.5%, less than 0.4%, less than 0.3%, less than 0.2%, less than 0.1%, less than 0.09%, less than 0.08%, less than 0.07%, less than 0.06%, less than 0.05%, less than 0.04%, less than 0.03%, less than 0.02%, or less than 0.01% indel formation in the target polynucleotide sequence. In some embodiments, any of the base editor systems comprising one of the ABE8 base editor variants described herein result in less than 0.8% indel formation in the target polynucleotide sequence. In some embodiments, any of the base editor systems comprising one of the ABE8 base editor variants described herein result in at most 0.8% indel formation in the target polynucleotide sequence. In some embodiments, any of the base editor systems comprising one of the ABE8 base editor variants described herein result in less than 0.3% indel formation in the target polynucleotide sequence. In some embodiments, any of the base editor systems comprising one of the ABE8 base editor variants described results in lower indel formation in the target polynucleotide sequence compared to a base editor system comprising one of ABE7 base editors. In some embodiments, any of the base editor systems comprising one of the ABE8 base editor variants described herein results in lower indel formation in the target polynucleotide sequence compared to a base editor system comprising an ABE7.10.

[0795] In some embodiments, any of the base editor systems comprising one of the ABE8 base editor variants described herein has reduction in indel frequency compared to a base editor system comprising one of the ABE7 base editors. In some embodiments, any of the base editor systems comprising one of the ABE8 base editor variants described herein has at least 0.01%, at least 1%, at least 2%, at least 3%, at least 4%, at least 5%, at least 10%, at least 15%, at least 20%, at least 25%, at least 30%, at least 35%, at least 40%, at least 45%, at least 50%, at least 55%, at least 60%, at least 65%, at least 70%, at least 75%, at least 80%, at least 85%, at least 90%, or at least 95% reduction in indel frequency compared to a base editor system comprising one of the ABE7 base editors. In some embodiments, a base editor system comprising one of the ABE8 base editor variants described herein has at least 0.01%, at least 1%, at least 2%, at least 3%, at least 4%, at least 5%, at least 10%, at least 15%, at least 20%, at least 25%, at least 30%, at least 35%, at least 40%, at least 45%, at least 50%, at least 55%, at least 60%, at least 65%, at least 70%, at least 75%, at least 80%, at least 85%, at least 90%, or at least 95% reduction in indel frequency compared to a base editor system comprising an ABE7.10.

[0796] The invention provides adenosine deaminase variants (e.g., ABE8 variants) that have increased efficiency and specificity. In particular, the adenosine deaminase variants described herein are more likely to edit a desired base within a polynucleotide, and are less likely to edit bases that are not intended to be altered (e.g., “bystanders”).

[0797] In some embodiments, any of the base editing system comprising one of the ABE8 base editor variants described herein has reduced bystander editing or mutations. In some embodiments, an unintended editing or mutation is a bystander mutation or bystander editing, for example, base editing of a target base (e.g., A or C) in an unintended or non-target position in a target window of a target nucleotide sequence. In some embodiments, any of the base editing system comprising one of the ABE8 base editor variants described herein has reduced bystander editing or mutations compared to a base editor system comprising an ABE7 base editor, e.g., ABE7.10. In some embodiments, any of the base editing system comprising one of the ABE8 base editor variants described herein has reduced bystander editing or mutations by at least 1%, at least 2%, at least 3%, at least 4%, at least 5%, at least 10%, at least 15%, at least 20%, at least 25%, at least 30%, at least 35%, at least 40%, at least 45%, at least 50%, at least 55%, at least 60%, at least 65%, at least 70%, at least 75%, at least 80%, at least 85%, at least 90%, at least 95%, or at least 99% compared to a base editor system comprising an ABE7 base editor, e.g., ABE7.10. In some embodiments, any of the base editing system comprising one of the ABE8 base editor variants described herein has reduced bystander editing or mutations by at least 1.1 fold, at least 1.2 fold, at least 1.3 fold, at least 1.4 fold, at least 1.5 fold, at least 1.6 fold, at least 1.7 fold, at least 1.8 fold, at least 1.9 fold, at least 2.0 fold, at least 2.1 fold, at least 2.2 fold, at least 2.3 fold, at least 2.4 fold, at least 2.5 fold, at least 2.6 fold, at least 2.7 fold, at least 2.8 fold, at least 2.9 fold, or at least 3.0 fold compared to a base editor system comprising an ABE7 base editor, e.g., ABE7.10.

[0798] In some embodiments, any of the base editing system comprising one of the ABE8 base editor variants described herein has reduced spurious editing. In some embodiments, an unintended editing or mutation is a spurious mutation or spurious editing, for example, non-specific editing or guide independent editing of a target base (e.g., A or C) in an unintended or non-target region of the genome. In some embodiments, any of the base editing system comprising one of the ABE8 base editor variants described herein has reduced spurious editing compared to a base editor system comprising an ABE7 base editor, e.g., ABE7.10. In some embodiments, any of the base editing system comprising one of the ABE8 base editor variants described herein has reduced spurious editing by at least 1%, at least 2%, at least 3%, at least 4%, at least 5%, at least 10%, at least 15%, at least 20%, at least 25%, at least 30%, at least 35%, at least 40%, at least 45%, at least 50%, at least 55%, at least 60%, at least 65%, at least 70%, at least 75%, at least 80%, at least 85%, at least 90%, at least 95%, or at least 99% compared to a base editor system comprising an ABE7 base editor, e.g., ABE7.10. In some embodiments, any of the base editing system comprising one of the ABE8 base editor variants described herein has reduced spurious editing by at least 1.1 fold, at least 1.2 fold, at least 1.3 fold, at least 1.4 fold, at least 1.5 fold, at least 1.6 fold, at least 1.7 fold, at least 1.8 fold, at least 1.9 fold, at least 2.0 fold, at least 2.1 fold, at least 2.2 fold, at least 2.3 fold, at least 2.4 fold, at least 2.5 fold, at least 2.6 fold, at least 2.7 fold, at least 2.8 fold, at least 2.9 fold, or at least 3.0 fold compared to a base editor system comprising an ABE7 base editor, e.g., ABE7.10.

[0799] In some embodiments, any of the ABE8 base editor variants described herein have at least 0.01%, at least 1%, at least 2%, at least 3%, at least 4%, at least 5%, at least 10%, at least 15%, at least 20%, at least 25%, at least 30%, at least 35%, at least 40%, at least 45%, at least 50%, at least 55%, at least 60%, at least 65%, at least 70%, at least 75%, at least 80%, at least 85%, at least 90%, at least 95%, or at least 99% base editing efficiency. In some embodiments, the base editing efficiency may be measured by calculating the percentage of edited nucleobases in a population of cells. In some embodiments, any of the ABE8 base editor variants described herein have base editing efficiency of at least 0.01%, at least 1%, at least 2%, at least 3%, at least 4%, at least 5%, at least 10%, at least 15%, at least 20%, at least 25%, at least 30%, at least 35%, at least 40%, at least 45%, at least 50%, at least 55%, at least 60%, at least 65%, at least 70%, at least 75%, at least 80%, at least 85%, at least 90%, at least 95%, or at least 99% as measured by edited nucleobases in a population of cells.

[0800] In some embodiments, any of the ABE8 base editor variants described herein has higher base editing efficiency compared to the ABE7 base editors. In some embodiments, any of the ABE8 base editor variants described herein have at least 1%, at least 2%, at least 3%, at least 4%, at least 5%, at least 10%, at least 15%, at least 20%, at least 25%, at least 30%, at least 35%, at least 40%, at least 45%, at least 50%, at least 55%, at least 60%, at least 65%, at least 70%, at least 75%, at least 80%, at least 85%, at least 90%, at least 95%, at least 99%, at least 100%, at least 105%, at least 110%, at least 115%, at least 120%, at least 125%, at least 130%, at least 135%, at least 140%, at least 145%, at least 150%, at least 155%, at least 160%, at least 165%, at least 170%, at least 175%, at least 180%, at least 185%, at least 190%, at least 195%, at least 200%, at least 210%, at least 220%, at least 230%, at least 240%, at least 250%, at least 260%, at least 270%, at least 280%, at least 290%, at least 300%, at least 310%, at least 320%, at least 330%, at least 340%, at least 350%, at least 360%, at least 370%, at least 380%, at least 390%, at least 400%, at least 450%, or at least 500% higher base editing efficiency compared to an ABE7 base editor, e.g., ABE7.10.

[0801] In some embodiments, any of the ABE8 base editor variants described herein has at least 1.1 fold, at least 1.2 fold, at least 1.3 fold, at least 1.4 fold, at least 1.5 fold, at least 1.6 fold, at least 1.7 fold, at least 1.8 fold, at least 1.9 fold, at least 2.0 fold, at least 2.1 fold, at least 2.2 fold, at least 2.3 fold, at least 2.4 fold, at least 2.5 fold, at least 2.6 fold, at least 2.7 fold, at least 2.8 fold, at least 2.9 fold, at least 3.0 fold, at least 3.1 fold, at least 3.2, at least 3.3 fold, at least 3.4 fold, at least 3.5 fold, at least 3.6 fold, at least 3.7 fold, at least 3.8 fold, at least 3.9 fold, at least 4.0 fold, at least 4.1 fold, at least 4.2 fold, at least 4.3 fold, at least 4.4 fold, at least 4.5 fold, at least 4.6 fold, at least 4.7 fold, at least 4.8 fold, at least 4.9 fold, or at least 5.0 fold higher base editing efficiency compared to an ABE7 base editor, e.g., ABE7.10.

[0802] In some embodiments, any of the ABE8 base editor variants described herein have at least 0.01%, at least 1%, at least 2%, at least 3%, at least 4%, at least 5%, at least 10%, at least 15%, at least 20%, at least 25%, at least 30%, at least 35%, at least 40%, at least 45%, at least 50%, at least 55%, at least 60%, at least 65%, at least 70%, at least 75%, at least 80%, at least 85%, at least 90%, at least 95%, or at least 99% on-target base editing efficiency. In some embodiments, any of the ABE8 base editor variants described herein have on-target base editing efficiency of at least 0.01%, at least 1%, at least 2%, at least 3%, at least 4%, at least 5%, at least 10%, at least 15%, at least 20%, at least 25%, at least 30%, at least 35%, at least 40%, at least 45%, at least 50%, at least 55%, at least 60%, at least 65%, at least 70%, at least 75%, at least 80%, at least 85%, at least 90%, at least 95%, or at least 99% as measured by edited target nucleobases in a population of cells.

[0803] In some embodiments, any of the ABE8 base editor variants described herein has higher on-target base editing efficiency compared to the ABE7 base editors. In some embodiments, any of the ABE8 base editor variants described herein have at least 1%, at least 2%, at least 3%, at least 4%, at least 5%, at least 10%, at least 15%, at least 20%, at least 25%, at least 30%, at least 35%, at least 40%, at least 45%, at least 50%, at least 55%, at least 60%, at least 65%, at least 70%, at least 75%, at least 80%, at least 85%, at least 90%, at least 95%, at least 99%, at least 100%, at least 105%, at least 110%, at least 115%, at least 120%, at least 125%, at least 130%, at least 135%, at least 140%, at least 145%, at least 150%, at least 155%, at least 160%, at least 165%, at least 170%, at least 175%, at least 180%, at least 185%, at least 190%, at least 195%, at least 200%, at least 210%, at least 220%, at least 230%, at least 240%, at least 250%, at least 260%, at least 270%, at least 280%, at least 290%, at least 300%, at least 310%, at least 320%, at least 330%, at least 340%, at least 350%, at least 360%, at least 370%, at least 380%, at least 390%, at least 400%, at least 450%, or at least 500% higher on-target base editing efficiency compared to an ABE7 base editor, e.g., ABE7.10.

[0804] In some embodiments, any of the ABE8 base editor variants described herein has at least 1.1 fold, at least 1.2 fold, at least 1.3 fold, at least 1.4 fold, at least 1.5 fold, at least 1.6 fold, at least 1.7 fold, at least 1.8 fold, at least 1.9 fold, at least 2.0 fold, at least 2.1 fold, at least 2.2 fold, at least 2.3 fold, at least 2.4 fold, at least 2.5 fold, at least 2.6 fold, at least 2.7 fold, at least 2.8 fold, at least 2.9 fold, at least 3.0 fold, at least 3.1 fold, at least 3.2 fold, at least 3.3 fold, at least 3.4 fold, at least 3.5 fold, at least 3.6 fold, at least 3.7 fold, at least 3.8 fold, at least 3.9 fold, at least 4.0 fold, at least 4.1 fold, at least 4.2 fold, at least 4.3 fold, at least 4.4 fold, at least 4.5 fold, at least 4.6 fold, at least 4.7 fold, at least 4.8 fold, at least 4.9 fold, or at least 5.0 fold higher on-target base editing efficiency compared to an ABE7 base editor, e.g., ABE7.10.

[0805] The ABE8 base editor variants described herein may be delivered to a host cell via a plasmid, a vector, a LNP complex, or an mRNA. In some embodiments, any of the ABE8 base editor variants described herein is delivered to a host cell as an mRNA. In some embodiments, an ABE8 base editor delivered via a nucleic acid based delivery system, e.g., an mRNA, has on-target editing efficiency of at least at least 1%, at least 2%, at least 3%, at least 4%, at least 5%, at least 10%, at least 15%, at least 20%, at least 25%, at least 30%, at least 35%, at least 40%, at least 45%, at least 50%, at least 55%, at least 60%, at least 65%, at least 70%, at least 75%, at least 80%, at least 85%, at least 90%, at least 95%, or at least 99% as measured by edited nucleobases. In some embodiments, an ABE8 base editor delivered by an mRNA system has higher base editing efficiency compared to an ABE8 base editor delivered by a plasmid or vector system. In some embodiments, any of the ABE8 base editor variants described herein has at least 1%, at least 2%, at least 3%, at least 4%, at least 5%, at least 10%, at least 15%, at least 20%, at least 25%, at least 30%, at least 35%, at least 40%, at least 45%, at least 50%, at least 55%, at least 60%, at least 65%, at least 70%, at least 75%, at least 80%, at least 85%, at least 90%, at least 95%, at least 99%, at least 100%, at least 105%, at least 110%, at least 115%, at least 120%, at least 125%, at least 130%, at least 135%, at least 140%, at least 145%, at least 150%, at least 155%, at least 160%, at least 165%, at least 170%, at least 175%, at least 180%, at least 185%, at least 190%, at least 195%, at least 200%, at least 210%, at least 220%, at least 230%, at least 240%, at least 250%, at least 260%, at least 270%, at least 280%, at least 290%, at least 300% higher, at least 310%, at least 320%, at least 330%, at least 340%, at least 350%, at least 360%, at least 370%, at least 380%, at least 390%, at least 400%, at least 450%, or at least 500% on-target editing efficiency when delivered by an mRNA system compared to when delivered by a plasmid or vector system. In some embodiments, any of the ABE8 base editor variants described herein has at least 1.1 fold, at least 1.2 fold, at least 1.3 fold, at least 1.4 fold, at least 1.5 fold, at least 1.6 fold, at least 1.7 fold, at least 1.8 fold, at least 1.9 fold, at least 2.0 fold, at least 2.1 fold, at least 2.2 fold, at least 2.3 fold, at least 2.4 fold, at least 2.5 fold, at least 2.6 fold, at least 2.7 fold, at least 2.8 fold, at least 2.9 fold, at least 3.0 fold, at least 3.1 fold, at least 3.2 fold, at least 3.3 fold, at least 3.4 fold, at least 3.5 fold, at least 3.6 fold, at least 3.7 fold, at least 3.8 fold, at least 3.9 fold, at least 4.0 fold, at least 4.1 fold, at least 4.2 fold, at least 4.3 fold, at least 4.4 fold, at least 4.5 fold, at least 4.6 fold, at least 4.7 fold, at least 4.8 fold, at least 4.9 fold, or at least 5.0 fold higher on-target editing efficiency when delivered by an mRNA system compared to when delivered by a plasmid or vector system.

[0806] In some embodiments, any of the base editor systems comprising one of the ABE8 base editor variants described herein result in less than 50%, less than 40%, less than 30%, less than 20%, less than 19%, less than 18%, less than 17%, less than 16%, less than 15%, less than 14%, less than 13%, less than 12%, less than 11%, less than 10%, less than 9%, less than 8%, less than 7%, less than 6%, less than 5%, less than 4%, less than 3%, less than 2%, less than 1%, less than 0.9%, less than 0.8%, less than 0.7%, less than 0.6%, less than 0.5%, less than 0.4%, less than 0.3%, less than 0.2%, less than 0.1%, less than 0.09%, less than 0.08%, less than 0.07%, less than 0.06%, less than 0.05%, less than 0.04%, less than 0.03%, less than 0.02%, or less than 0.01% off-target editing in the target polynucleotide sequence.

[0807] In some embodiments, any of the ABE8 base editor variants described herein has lower guided off-target editing efficiency when delivered by an mRNA system compared to when delivered by a plasmid or vector system. In some embodiments, any of the ABE8 base editor variants described herein has at least 1%, at least 2%, at least 3%, at least 4%, at least 5%, at least 10%, at least 15%, at least 20%, at least 25%, at least 30%, at least 35%, at least 40%, at least 45%, at least 50%, at least 55%, at least 60%, at least 65%, at least 70%, at least 75%, at least 80%, at least 85%, at least 90%, at least 95%, or at least 99% lower guided off-target editing efficiency when delivered by an mRNA system compared to when delivered by a plasmid or vector system. In some embodiments, any of the ABE8 base editor variants described herein has at least 1.1 fold, at least 1.2 fold, at least 1.3 fold, at least 1.4 fold, at least 1.5 fold, at least 1.6 fold, at least 1.7 fold, at least 1.8 fold, at least 1.9 fold, at least 2.0 fold, at least 2.1 fold, at least 2.2 fold, at least 2.3 fold, at least 2.4 fold, at least 2.5 fold, at least 2.6 fold, at least 2.7 fold, at least 2.8 fold, at least 2.9 fold, or at least 3.0 fold lower guided off-target editing efficiency when delivered by an mRNA system compared to when delivered by a plasmid or vector system. In some embodiments, any of the ABE8 base editor variants described herein has at least about 2.2 fold decrease in guided off-target editing efficiency when delivered by an mRNA system compared to when delivered by a plasmid or vector system.

[0808] In some embodiments, any of the ABE8 base editor variants described herein has lower guide-independent off-target editing efficiency when delivered by an mRNA system compared to when delivered by a plasmid or vector system. In some embodiments, any of the ABE8 base editor variants described herein has at least 1%, at least 2%, at least 3%, at least 4%, at least 5%, at least 10%, at least 15%, at least 20%, at least 25%, at least 30%, at least 35%, at least 40%, at least 45%, at least 50%, at least 55%, at least 60%, at least 65%, at least 70%, at least 75%, at least 80%, at least 85%, at least 90%, at least 95%, or at least 99% lower guide-independent off-target editing efficiency when delivered by an mRNA system compared to when delivered by a plasmid or vector system. In some embodiments, any of the ABE8 base editor variants described herein has at least 1.1 fold, at least 1.2 fold, at least 1.3 fold, at least 1.4 fold, at least 1.5 fold, at least 1.6 fold, at least 1.7 fold, at least 1.8 fold, at least 1.9 fold, at least 2.0 fold, at least 2.1 fold, at least 2.2 fold, at least 2.3 fold, at least 2.4 fold, at least 2.5 fold, at least 2.6 fold, at least 2.7 fold, at least 2.8 fold, at least 2.9 fold, at least 3.0 fold, at least 5.0 fold, at least 10.0 fold, at least 20.0 fold, at least 50.0 fold, at least 70.0 fold, at least 100.0 fold, at least 120.0 fold, at least 130.0 fold, or at least 150.0 fold lower guide-independent off-target editing efficiency when delivered by an mRNA system compared to when delivered by a plasmid or vector system. In some embodiments, ABE8 base editor variants described herein has 134.0 fold decrease in guide-independent off-target editing efficiency (e.g., spurious RNA deamination) when delivered by an mRNA system compared to when delivered by a plasmid or vector system. In some embodiments, ABE8 base editor variants described herein does not increase guide-independent mutation rates across the genome.

[0809] In some embodiments, a single gene delivery event (e.g., by transduction, transfection, electroporation or any other method) can be used to target base editing of 5 sequences within a cell's genome. In some embodiments, a single gene delivery event can be used to target base editing of 6 sequences within a cell's genome. In some embodiments, a single gene delivery event can be used to target base editing of 7 sequences within a cell's genome. In some embodiments, a single electroporation event can be used to target base editing of 8 sequences within a cell's genome. In some embodiments, a single gene delivery event can be used to target base editing of 9 sequences within a cell's genome. In some embodiments, a single gene delivery event can be used to target base editing of 10 sequences within a cell's genome. In some embodiments, a single gene delivery event can be used to target base editing of 20 sequences within a cell's genome. In some embodiments, a single gene delivery event can be used to target base editing of 30 sequences within a cell's genome. In some embodiments, a single gene delivery event can be used to target base editing of 40 sequences within a cell's genome. In some embodiments, a single gene delivery event can be used to target base editing of 50 sequences within a cell's genome.

[0810] In some embodiments, the method described herein, for example, the base editing methods has minimum to no off-target effects.

[0811] In some embodiments, the base editing method described herein results in at least 50% of a cell population that have been successfully edited (i.e., cells that have been successfully engineered). In some embodiments, the base editing method described herein results in at least 55% of a cell population that have been successfully edited. In some embodiments, the base editing method described herein results in at least 60% of a cell population that have been successfully edited. In some embodiments, the base editing method described herein results in at least 65% of a cell population that have been successfully edited. In some embodiments, the base editing method described herein results in at least 70% of a cell population that have been successfully edited. In some embodiments, the base editing method described herein results in at least 75% of a cell population that have been successfully edited. In some embodiments, the base editing method described herein results in at least 80% of a cell population that have been successfully edited. In some embodiments, the base editing method described herein results in at least 85% of a cell population that have been successfully edited. In some embodiments, the base editing method described herein results in at least 90% of a cell population that have been successfully edited. In some embodiments, the base editing method described herein results in at least 95% of a cell population that have been successfully edited. In some embodiments, the base editing method described herein results in about 91%, 92%, 93%, 94%, 95%, 96%, 97%, 98%, 99% or 100% of a cell population that have been successfully edited.

[0812] In some embodiments, the live cell recovery following a base editing intervention is greater than at least 60%, 70%, 80%, 90% of the starting cell population at the time of the base editing event. In some embodiments, the live cell recovery as described above is about 70%. In some embodiments, the live cell recovery as described above is about 75%. In some embodiments, the live cell recovery as described above is about 80%. In some embodiments, the live cell recovery as described above is about 85%. In some embodiments, the live cell recovery as described above is about 90%, or about 91%, 92%, 93%, 94% 95%, 96%, 97%, 98%, or 99%, or 100% of the cells in the population at the time of the base editing event.

[0813] In some embodiments the engineered cell population can be further expanded in vitro by about 2 fold, about 3-fold, about 4-fold, about 5-fold, about 6-fold, about 7-fold, about 8-fold, about 9-fold, about 10-fold, about 15-fold, about 20-fold, about 25-fold, about 30-fold, about 35-fold, about 40-fold, about 45-fold, about 50-fold, or about 100-fold.

[0814] The number of intended mutations and indels can be determined using any suitable method, for example, as described in International PCT Application Nos. PCT/2017/045381 (WO2018/027078) and PCT/US2016/058344 (WO2017/070632); Komor, A. C., et al., “Programmable editing of a target base in genomic DNA without double-stranded DNA cleavage” Nature 533, 420-424 (2016); Gaudelli, N. M., et al., “Programmable base editing of A•T to G•C in genomic DNA without DNA cleavage” Nature 551, 464-471 (2017); and Komor, A. C., et al., “Improved base excision repair inhibition and bacteriophage Mu Gam protein yields C:G-to-T:A base editors with higher efficiency and product purity” Science Advances 3:eaao4774 (2017); the entire contents of which are hereby incorporated by reference.

[0815] In some embodiments, to calculate indel frequencies, sequencing reads are scanned for exact matches to two 10-bp sequences that flank both sides of a window in which indels can occur. If no exact matches are located, the read is excluded from analysis. If the length of this indel window exactly matches the reference sequence the read is classified as not containing an indel. If the indel window is two or more bases longer or shorter than the reference sequence, then the sequencing read is classified as an insertion or deletion, respectively. In some embodiments, the base editors provided herein can limit formation of indels in a region of a nucleic acid. In some embodiments, the region is at a nucleotide targeted by a base editor or a region within 2, 3, 4, 5, 6, 7, 8, 9, or 10 nucleotides of a nucleotide targeted by a base editor.

[0816] The number of indels formed at a target nucleotide region can depend on the amount of time a nucleic acid (e.g., a nucleic acid within the genome of a cell) is exposed to a base editor. In some embodiments, the number or proportion of indels is determined after at least 1 hour, at least 2 hours, at least 6 hours, at least 12 hours, at least 24 hours, at least 36 hours, at least 48 hours, at least 3 days, at least 4 days, at least 5 days, at least 7 days, at least 10 days, or at least 14 days of exposing the target nucleotide sequence (e.g., a nucleic acid within the genome of a cell) to a base editor. It should be appreciated that the characteristics of the base editors as described herein can be applied to any of the fusion proteins, or methods of using the fusion proteins provided herein.

[0817] Details of base editor efficiency are described in International PCT Application Nos. PCT/2017/045381 (WO 2018/027078) and PCT/US2016/058344 (WO 2017/070632), each of which is incorporated herein by reference for its entirety. Also see Komor, A. C., et al., “Programmable editing of a target base in genomic DNA without double-stranded DNA cleavage” Nature 533, 420-424 (2016); Gaudelli, N. M., et al., “Programmable base editing of A•T to G•C in genomic DNA without DNA cleavage” Nature 551, 464-471 (2017); and Komor, A. C., et al., “Improved base excision repair inhibition and bacteriophage Mu Gam protein yields C:G-to-T:A base editors with higher efficiency and product purity” Science Advances 3:eaao4774 (2017), the entire contents of which are hereby incorporated by reference. In some embodiments, editing of a plurality of nucleobase pairs in one or more genes using the methods provided herein results in formation of at least one intended mutation. In some embodiments, said formation of said at least one intended mutation results in the disruption the normal function of a gene. In some embodiments, said formation of said at least one intended mutation results decreases or eliminates the expression of a protein encoded by a gene. It should be appreciated that multiplex editing can be accomplished using any method or combination of methods provided herein.

### Multiplex Editing

[0818] In some embodiments, the base editor system provided herein is capable of multiplex editing of a plurality of nucleobase pairs in one or more genes. In some embodiments, the plurality of nucleobase pairs is located in the same gene or in one or more genes, wherein at least one gene is located in a different locus. In some embodiments, the multiplex editing can comprise one or more guide polynucleotides. In some embodiments, the multiplex editing can comprise one or more base editor systems. In some embodiments, the multiplex editing can comprise one or more base editor systems with a single guide polynucleotide or a plurality of guide polynucleotides. In some embodiments, the multiplex editing can comprise one or more guide polynucleotides with a single base editor system. In some embodiments, the multiplex editing can comprise at least one guide polynucleotide that does or does not require a PAM sequence to target binding to a target polynucleotide sequence. In some embodiments, the multiplex editing can comprise a mix of at least one guide polynucleotide that does not require a PAM sequence to target binding to a target polynucleotide sequence and at least one guide polynucleotide that require a PAM sequence to target binding to a target polynucleotide sequence. It should be appreciated that the characteristics of the multiplex editing using any of the base editors as described herein can be applied to any combination of methods using any base editor provided herein. It should also be appreciated that the multiplex editing using any of the base editors as described herein can comprise a sequential editing of a plurality of nucleobase pairs.

[0819] In some embodiments, the plurality of nucleobase pairs are in one more genes. In some embodiments, the plurality of nucleobase pairs is in the same gene. In some embodiments, at least one gene in the one more genes is located in a different locus.

[0820] In some embodiments, the editing is editing of the plurality of nucleobase pairs in at least one protein coding region, in at least one protein non-coding region, or in at least one protein coding region and at least one protein non-coding region.

[0821] In some embodiments, the editing is in conjunction with one or more guide polynucleotides. In some embodiments, the base editor system can comprise one or more base editor systems. In some embodiments, the base editor system can comprise one or more base editor systems in conjunction with a single guide polynucleotide or a plurality of guide polynucleotides. In some embodiments, the editing is in conjunction with one or more guide polynucleotide with a single base editor system. In some embodiments, the editing is in conjunction with at least one guide polynucleotide that does not require a PAM sequence to target binding to a target polynucleotide sequence or with at least one guide polynucleotide that requires a PAM sequence to target binding to a target polynucleotide sequence, or with a mix of at least one guide polynucleotide that does not require a PAM sequence to target binding to a target polynucleotide sequence and at least one guide polynucleotide that does require a PAM sequence to target binding to a target polynucleotide sequence. It should be appreciated that the characteristics of the multiplex editing using any of the base editors as described herein can be applied to any of combination of the methods of using any of the base editors provided herein. It should also be appreciated that the editing can comprise a sequential editing of a plurality of nucleobase pairs.

[0822] In some embodiments, the base editor system capable of multiplex editing of a plurality of nucleobase pairs in one or more genes comprises one of ABE7, ABE8, and/or ABE9 base editors. In some embodiments, the base editor system capable of multiplex editing comprising one of the ABE8 base editor variants described herein has higher multiplex editing efficiency compared to the base editor system capable of multiplex editing comprising one of ABE7 base editors. In some embodiments, the base editor system capable of multiplex editing comprising one of the ABE8 base editor variants described herein has at least 1%, at least 2%, at least 3%, at least 4%, at least 5%, at least 10%, at least 15%, at least 20%, at least 25%, at least 30%, at least 35%, at least 40%, at least 45%, at least 50%, at least 55%, at least 60%, at least 65%, at least 70%, at least 75%, at least 80%, at least 85%, at least 90%, at least 95%, at least 99%, at least 100%, at least 105%, at least 110%, at least 115%, at least 120%, at least 125%, at least 130%, at least 135%, at least 140%, at least 145%, at least 150%, at least 155%, at least 160%, at least 165%, at least 170%, at least 175%, at least 180%, at least 185%, at least 190%, at least 195%, at least 200%, at least 210%, at least 220%, at least 230%, at least 240%, at least 250%, at least 260%, at least 270%, at least 280%, at least 290%, at least 300% higher, at least 310%, at least 320%, at least 330%, at least 340%, at least 350%, at least 360%, at least 370%, at least 380%, at least 390%, at least 400%, at least 450%, or at least 500% higher multiplex editing efficiency compared the base editor system capable of multiplex editing comprising one of ABE7 base editors. In some embodiments, the base editor system capable of multiplex editing comprising one of the ABE8 base editor variants described herein has at least 1.1 fold, at least 1.2 fold, at least 1.3 fold, at least 1.4 fold, at least 1.5 fold, at least 1.6 fold, at least 1.7 fold, at least 1.8 fold, at least 1.9 fold, at least 2.0 fold, at least 2.1 fold, at least 2.2 fold, at least 2.3 fold, at least 2.4 fold, at least 2.5 fold, at least 2.6 fold, at least 2.7 fold, at least 2.8 fold, at least 2.9 fold, at least 3.0 fold, at least 3.1 fold, at least 3.2 fold, at least 3.3 fold, at least 3.4 fold, at least 3.5 fold, at least 4.0 fold, at least 4.5 fold, at least 5.0 fold, at least 5.5 fold, or at least 6.0 fold higher multiplex editing efficiency compared the base editor system capable of multiplex editing comprising one of ABE7 base editors.

### Delivery System

[0823] The suitability of nucleobase editors to target one or more nucleotides in a gene (e.g., a transthyretin (TTR) gene) is evaluated as described herein. In one embodiment, a single cell of interest is transfected, transduced, or otherwise modified with a nucleic acid molecule or molecules encoding a base editing system described herein together with a small amount of a vector encoding a reporter (e.g., GFP). These cells can be any cell line known in the art, including hepatocytes. Alternatively, primary cells (e.g., human) may be used. Cells may also be obtained from a subject or individual, such as from tissue biopsy, surgery, blood, plasma, serum, or other biological fluid. Such cells may be relevant to the eventual cell target.

[0824] Delivery may be performed using a viral vector. In one embodiment, transfection may be performed using lipid transfection (such as Lipofectamine or Fugene) or by electroporation. Following transfection, expression of a reporter (e.g., GFP) can be determined either by fluorescence microscopy or by flow cytometry to confirm consistent and high levels of transfection. These preliminary transfections can comprise different nucleobase editors to determine which combinations of editors give the greatest activity. The system can comprise one or more different vectors. In one embodiment, the base editor is codon optimized for expression of the desired cell type, preferentially a eukaryotic cell, preferably a mammalian cell or a human cell.

[0825] The activity of the nucleobase editor is assessed as described herein, i.e., by sequencing the genome of the cells to detect alterations in a target sequence. For Sanger sequencing, purified PCR amplicons are cloned into a plasmid backbone, transformed, miniprepped and sequenced with a single primer. Sequencing may also be performed using next generation sequencing (NGS) techniques. When using next generation sequencing, amplicons may be 300-500 bp with the intended cut site placed asymmetrically. Following PCR, next generation sequencing adapters and barcodes (for example Illumina multiplex adapters and indexes) may be added to the ends of the amplicon, e.g., for use in high throughput sequencing (for example on an Illumina MiSeq). The fusion proteins that induce the greatest levels of target specific alterations in initial tests can be selected for further evaluation.

[0826] In particular embodiments, the nucleobase editors are used to target polynucleotides of interest. In one embodiment, a nucleobase editor of the invention is delivered to cells (e.g., hepatocytes) in conjunction with one or more guide RNAs that are used to target one or more nucleic acid sequences of interest within the genome of a cell, thereby altering the target gene(s) (e.g., a transthyretin gene (TTR)). In some embodiments, a base editor is targeted by one or more guide RNAs to introduce one or more edits to the sequence of one or more genes of interest (e.g., a transthyretin gene (TTR)). In some embodiments, the one or more edits to the sequence of one or more genes of interest decrease or eliminate expression of the protein encoded by the gene in the host cell (e.g., a transthyretin (TTR) polypeptide). In some embodiments, expression of one or more proteins encoded by one or more genes of interest (e.g., a transthyretin (TTR) gene) is completely knocked out or eliminated in the host cell ((e.g., a hepatocyte).

[0827] In some embodiments, the host cell is a mammalian cell. In some embodiments, the host cell is a human cell.

### Nucleic Acid-Based Delivery of Base Editor Systems

[0828] Nucleic acid molecules encoding a base editor system according to the present disclosure can be administered to subjects or delivered into cells in vitro or in vivo by art-known methods or as described herein. For example, a base editor system comprising a deaminase (e.g., cytidine or adenine deaminase) can be delivered by vectors (e.g., viral or non-viral vectors), or by naked DNA, DNA complexes, lipid nanoparticles, or a combination of the aforementioned compositions.

[0829] Nanoparticles, which can be organic or inorganic, are useful for delivering a base editor system or component thereof. Nanoparticles are well known in the art and any suitable nanoparticle can be used to deliver a base editor system or component thereof, or a nucleic acid molecule encoding such components. In one example, organic (e.g. lipid and/or polymer) nanoparticles are suitable for use as delivery vehicles in certain embodiments of this disclosure. Exemplary lipids for use in nanoparticle formulations, and/or gene transfer are shown in Table 17 (below).

TABLE 17
Lipids used for gene transfer.
Lipids Used for Gene Transfer

| Lipid | Abbreviation | Feature |
|---|---|---|
| 1,2-Dioleoyl-sn-glycero-3-phosphatidylcholine | DOPC | Helper |
| 1,2-Dioleoyl-sn-glycero-3-phosphatidylethanolamine | DOPE | Helper |
| Cholesterol | | Helper |
| N-[1-(2,3-Dioleyloxy)prophyl]N,N,N-trimethylammonium | DOTMA | Cationic |
| chloride | | |
| 1,2-Dioleoyloxy-3-trimethylammonium-propane | DOTAP | Cationic |
| Dioctadecylamidoglycylspermine | DOGS | Cationic |
| N-(3-Aminopropyl)-N,N-dimethyl-2,3-bis(dodecyloxy)-1- | GAP-DLRIE | Cationic |
| propanaminium bromide | | |
| Cetyltrimethylammonium bromide | CTAB | Cationic |
| 6-Lauroxyhexyl ornithinate | LHON | Cationic |
| 1-(2,3-Dioleoyloxypropyl)-2,4,6-trimethylpyridinium | 2Oc | Cationic |
| 2,3-Dioleyloxy-N-[2(sperminecarboxamido-ethyl]-N,N- | DOSPA | Cationic |
| dimethy1-1-propanaminium trifluoroacetate | | |
| 1,2-Dioleyl-3-trimethylammonium-propane | DOPA | Cationic |
| N-(2-Hydroxyethyl)-N,N-dimethyl-2,3-bis(tetradecyloxy)-1- | MDRIE | Cationic |
| propanaminium bromide | | |
| Dimyristooxypropyl dimethyl hydroxyethyl ammonium bromide | DMRI | Cationic |
| 3β-[N-(N′,N′-Dimethylaminoethane)-carbamoyl]cholesterol | DC-Chol | Cationic |
| Bis-guanidium-tren-cholesterol | BGTC | Cationic |
| 1,3-Diodeoxy-2-(6-carboxy-spermyl)-propylamide | DOSPER | Cationic |
| Dimethyloctadecylammonium bromide | DDAB | Cationic |
| Dioctadecylamidoglicylspermidin | DSL | Cationic |
| rac-[(2,3-Dioctadecyloxypropyl)(2-hydroxyethyl)]- | CLIP-1 | Cationic |
| dimethylammonium chloride | | |
| rac-[2(2,3-Dihexadecyloxypropyl- | CLIP-6 | Cationic |
| oxymethyloxy)ethyl]trimethylammoniun bromide | | |
| Ethyldimyristoylphosphatidylcholine | EDMPC | Cationic |
| 1,2-Distearyloxy-N,N-dimethyl-3-aminopropane | DSDMA | Cationic |
| 1,2-Dimyristoyl-trimethylammonium propane | DMTAP | Cationic |
| O,O′-Dimyristyl-N-lysyl aspartate | DMKE | Cationic |
| 1,2-Distearoyl-sn-glycero-3-ethylpho sphocholine | DSEPC | Cationic |
| N-Palmitoyl D-erythro-sphingosyl carbamoyl-spermine | CCS | Cationic |
| N-t-Butyl-N0-tetradecy1-3-tetradecylaminopropionamidine | diC14-amidine | Cationic |
| Octadecenolyoxy[ethyl-2-heptadeceny1-3 hydroxyethyl] | DOTIM | Cationic |
| imidazolinium chloride | | |
| N1-Cholesteryloxycarbonyl-3,7-diazanonane-1,9-diamine | CDAN | Cationic |
| 2-(3-[Bis(3-amino-propyl)-amino]propylamino)-N- | RPR209120 | Cationic |
| ditetradecylcarbamoylme-ethyl-acetamide | | |
| 1,2-dilinoleyloxy-3-dimethylaminopropane | DLinDMA | Cationic |
| 2,2-dilinoley1-4-dimethylaminoethyl-[1,3]-dioxolane | DLin-KC2- | Cationic |
| | DMA | |
| dilinoleyl-methyl-4-dimethylaminobutyrate | DLin-MC3- | Cationic |
| | DMA | |

[0830] Table 18 lists exemplary polymers for use in gene transfer and/or nanoparticle formulations.

TABLE 18
Polymers used for gene transfer.
Polymers Used for Gene Transfer

| Polymer | Abbreviation |
|---|---|
| Poly(ethylene)glycol | PEG |
| Polyethylenimine | PEI |
| Dithiobis (succinimidylpropionate) | DSP |
| Dimethyl-3,3′-dithiobispropionimidate | DTBP |
| Poly(ethylene imine)biscarbamate | PEIC |
| Poly(L-lysine) | PLL |
| Histidine modified PLL | |
| Poly(N-vinylpyrrolidone) | PVP |
| Poly(propylenimine) | PPI |
| Poly(amidoamine) | PAMAM |
| Poly(amidoethylenimine) | SS-PAEI |
| Triethylenetetramine | TETA |
| Poly(β-aminoester) | |
| Poly(4-hydroxy-L-proline ester) | PHP |
| Poly(allylamine) | |
| Poly(α-[4-aminobutyl]-L-glycolic acid) | PAGA |
| Poly(D,L-lactic-co-glycolic acid) | PLGA |
| Poly(N-ethyl-4-vinylpyridinium bromide) | |
| Poly(phosphazene)s | PPZ |
| Poly(phosphoester)s | PPE |
| Poly(phosphoramidate)s | PPA |
| Poly(N-2-hydroxypropylmethacrylamide) | pHPMA |
| Poly (2-(dimethylamino)ethyl methacrylate) | pDMAEMA |
| Poly(2-aminoethyl propylene phosphate) | PPE-EA |
| Chitosan | |
| Galactosylated chitosan | |
| N-Dodacylated chitosan | |
| Histone | |
| Collagen | |
| Dextran-spermine | D-SPM |

[0831] Table 19 summarizes delivery methods for a polynucleotide encoding a fusion protein described herein.

TABLE 19
Delivery methods.

| | | Delivery into | | | Type of |
|---|---|---|---|---|---|
| | | Non-Dividing | Duration of | Genome | Molecule |
| Delivery | Vector/Mode | Cells | Expression | Integration | Delivered |
| Physical | (e.g., | YES | Transient | NO | Nucleic Acids |
| | electroporation, | | | | and Proteins |
| | particle gun, | | | | |
| | Calcium | | | | |
| | Phosphate | | | | |
| | transfection | | | | |
| Viral | Retrovirus | NO | Stable | YES | RNA |
| | Lentivirus | YES | Stable | YES/NO with | RNA |
| | | | | modification | |
| | Adenovirus | YES | Transient | NO | DNA |
| | Adeno- | YES | Stable | NO | DNA |
| | Associated | | | | |
| | Virus (AAV) | | | | |
| | Vaccinia Virus | YES | Very | NO | DNA |
| | | | Transient | | |
| | Herpes Simplex | YES | Stable | NO | DNA |
| | Virus | | | | |
| Non-Viral | Cationic | YES | Transient | Depends on | Nucleic Acids |
| | Liposomes | | | what is | and Proteins |
| | | | | delivered | |
| | Polymeric | YES | Transient | Depends on | Nucleic Acids |
| | Nanoparticles | | | what is | and Proteins |
| | | | | delivered | |
| Biological | Attenuated | YES | Transient | NO | Nucleic Acids |
| Non-Viral | Bacteria | | | | |
| Delivery | Engineered | YES | Transient | NO | Nucleic Acids |
| Vehicles | Bacteriophages | | | | |
| | Mammalian | YES | Transient | NO | Nucleic Acids |
| | Virus-like | | | | |
| | Particles | | | | |
| | Biological | YES | Transient | NO | Nucleic Acids |
| | liposomes: | | | | |
| | Erythrocyte | | | | |
| | Ghosts and | | | | |
| | Exosomes | | | | |

[0832] In another aspect, the delivery of base editor system components or nucleic acids encoding such components, for example, a polynucleotide programmable nucleotide binding domain (e.g., Cas9) such as, for example, Cas9 or variants thereof, and a gRNA targeting a nucleic acid sequence of interest, may be accomplished by delivering the ribonucleoprotein (RNP) to cells. The RNP comprises a polynucleotide programmable nucleotide binding domain (e.g., Cas9), in complex with the targeting gRNA. RNPs or polynucleotides described herein may be delivered to cells using known methods, such as electroporation, nucleofection, or cationic lipid-mediated methods, for example, as reported by Zuris, J. A. et al., 2015, Nat. Biotechnology, 33(1):73-80, which is incorporated by reference in its entirety. RNPs are advantageous for use in CRISPR base editing systems, particularly for cells that are difficult to transfect, such as primary cells. In addition, RNPs can also alleviate difficulties that may occur with protein expression in cells, especially when eukaryotic promoters, e.g., CMV or EF1A, which may be used in CRISPR plasmids, are not well-expressed. Advantageously, the use of RNPs does not require the delivery of foreign DNA into cells. Moreover, because an RNP comprising a nucleic acid binding protein and gRNA complex is degraded over time, the use of RNPs has the potential to limit off-target effects. In a manner similar to that for plasmid based techniques, RNPs can be used to deliver binding protein (e.g., Cas9 variants) and to direct homology directed repair (HDR).

[0833] Nucleic acid molecules encoding a base editor system can be delivered directly to cells (e.g., hepatocytes) as naked DNA or RNA by means of transfection or electroporation, for example, or can be conjugated to molecules (e.g., N-acetylgalactosamine) promoting uptake by the target cells. Vectors encoding base editor systems and/or their components can also be used. In particular embodiments, a polynucleotide, e.g. a mRNA encoding a base editor system or a functional component thereof, may be co-electroporated with one or more guide RNAs as described herein.

[0834] Nucleic acid vectors can comprise one or more sequences encoding a domain of a fusion protein described herein. A vector can also encode a protein component of a base editor system operably linked to a nuclear localization signal, nucleolar localization signal, or mitochondrial localization signal. As one example, a vector can include a Cas9 coding sequence that includes one or more nuclear localization sequences (e.g., a nuclear localization sequence from SV40), and one or more deaminases.

[0835] The vector can also include any suitable number of regulatory/control elements, e.g., promoters, enhancers, introns, polyadenylation signals, Kozak consensus sequences, or internal ribosome entry sites (IRES). These elements are well known in the art.

[0836] Vectors according to this disclosure include recombinant viral vectors. Exemplary viral vectors are set forth herein above. Other viral vectors known in the art can also be used. In addition, viral particles can be used to deliver base editor system components in nucleic acid and/or protein form. For example, “empty” viral particles can be assembled to contain a base editor system or component as cargo. Viral vectors and viral particles can also be engineered to incorporate targeting ligands to alter target tissue specificity.

[0837] Vectors described herein may comprise regulatory elements to drive expression of a base editor system or component thereof. Such vectors include adeno-associated viruses with inverted long terminal repeats (AAV ITR). The use of AAV-ITR can be advantageous for eliminating the need for an additional promoter element, which can take up space in the vector. The additional space freed up can be used to drive the expression of additional elements, such as a guide nucleic acid or a selectable marker. ITR activity can be used to reduce potential toxicity due to over expression.

[0838] Any suitable promoter can be used to drive expression of a base editor system or component thereof and, where appropriate, the guide nucleic acid. For ubiquitous expression, promoters include CMV, CAG, CBh, PGK, SV40, Ferritin heavy or light chains. For brain or other CNS cell expression, suitable promoters include: SynapsinI for all neurons, CaMKIIalpha for excitatory neurons, GAD67 or GAD65 or VGAT for GABAergic neurons. For liver cell expression, suitable promoters include the Albumin promoter. For lung cell expression, suitable promoters include SP-B. For endothelial cells, suitable promoters include ICAM. For hematopoietic cell expression suitable promoters include IFNbeta or CD45. For osteoblast expression suitable promoters can include OG-2.

[0839] In some embodiments, a base editor system of the present disclosure is of small enough size to allow separate promoters to drive expression of the base editor and a compatible guide nucleic acid within the same nucleic acid molecule. For instance, a vector or viral vector can comprise a first promoter operably linked to a nucleic acid encoding the base editor and a second promoter operably linked to the guide nucleic acid.

[0840] The promoter used to drive expression of a guide nucleic acid can include: Pol III promoters, such as U6 or H1 Use of Pol II promoter and intronic cassettes to express gRNA Adeno Associated Virus (AAV).

[0841] In particular embodiments, a fusion protein of the invention is encoded by a polynucleotide present in a viral vector (e.g., adeno-associated virus (AAV), AAV3, AAV3b, AAV4, AAV5, AAV6, AAV7, AAV8, AAV9, AAVrh8, AAV10, and variants thereof), or a suitable capsid protein of any viral vector. Thus, in some aspects, the disclosure relates to the viral delivery of a fusion protein. Examples of viral vectors include retroviral vectors (e.g. Maloney murine leukemia virus, MML-V), adenoviral vectors (e.g. AD100), lentiviral vectors (HIV and FIV-based vectors), herpesvirus vectors (e.g. HSV-2).

[0842] In some aspects, the methods described herein for editing specific genes in a cell can be used to genetically modify the cell. In embodiments, the cell is a hepatocyte.

### Viral Vectors

[0843] A base editor described herein can therefore be delivered with viral vectors. In some embodiments, a base editor disclosed herein can be encoded on a nucleic acid that is contained in a viral vector. In some embodiments, one or more components of the base editor system can be encoded on one or more viral vectors. For example, a base editor and guide nucleic acid can be encoded on a single viral vector. In other embodiments, the base editor and guide nucleic acid are encoded on different viral vectors. In either case, the base editor and guide nucleic acid can each be operably linked to a promoter and terminator. The combination of components encoded on a viral vector can be determined by the cargo size constraints of the chosen viral vector.

[0844] The use of RNA or DNA viral based systems for the delivery of a base editor takes advantage of highly evolved processes for targeting a virus to specific cells in culture or in the host and trafficking the viral payload to the nucleus or host cell genome. Viral vectors can be administered directly to cells in culture, patients (in vivo), or they can be used to treat cells in vitro, and the modified cells can optionally be administered to patients (ex vivo). Conventional viral based systems could include retroviral, lentivirus, adenoviral, adeno-associated and herpes simplex virus vectors for gene transfer. Integration in the host genome is possible with the retrovirus, lentivirus, and adeno-associated virus gene transfer methods, often resulting in long term expression of the inserted transgene. Additionally, high transduction efficiencies have been observed in many different cell types and target tissues.

[0845] Viral vectors can include lentivirus (e.g., HIV and FIV-based vectors), Adenovirus (e.g., AD100), Retrovirus (e.g., Maloney murine leukemia virus, MML-V), herpesvirus vectors (e.g., HSV-2), and Adeno-associated viruses (AAVs), or other plasmid or viral vector types, in particular, using formulations and doses from, for example, U.S. Pat. No. 8,454,972 (formulations, doses for adenovirus), U.S. Pat. No. 8,404,658 (formulations, doses for AAV) and U.S. Pat. No. 5,846,946 (formulations, doses for DNA plasmids) and from clinical trials and publications regarding the clinical trials involving lentivirus, AAV and adenovirus. For example, for AAV, the route of administration, formulation and dose can be as in U.S. Pat. No. 8,454,972 and as in clinical trials involving AAV. For Adenovirus, the route of administration, formulation and dose can be as in U.S. Pat. No. 8,404,658 and as in clinical trials involving adenovirus. For plasmid delivery, the route of administration, formulation and dose can be as in U.S. Pat. No. 5,846,946 and as in clinical studies involving plasmids. Doses can be based on or extrapolated to an average 70 kg individual (e.g. a male adult human), and can be adjusted for patients, subjects, mammals of different weight and species. Frequency of administration is within the ambit of the medical or veterinary practitioner (e.g., physician, veterinarian), depending on usual factors including the age, sex, general health, other conditions of the patient or subject and the particular condition or symptoms being addressed. The viral vectors can be injected into the tissue of interest. For cell-type specific base editing, the expression of the base editor and optional guide nucleic acid can be driven by a cell-type specific promoter.

[0846] The tropism of a retrovirus can be altered by incorporating foreign envelope proteins, expanding the potential target population of target cells. Lentiviral vectors are retroviral vectors that are able to transduce or infect non-dividing cells and typically produce high viral titers. Selection of a retroviral gene transfer system would therefore depend on the target tissue. Retroviral vectors are comprised of cis-acting long terminal repeats with packaging capacity for up to 6-10 kb of foreign sequence. The minimum cis-acting LTRs are sufficient for replication and packaging of the vectors, which are then used to integrate the therapeutic gene into the target cell to provide permanent transgene expression. Widely used retroviral vectors include those based upon murine leukemia virus (MuLV), gibbon ape leukemia virus (GaLV), Simian Immuno deficiency virus (SIV), human immuno deficiency virus (HIV), and combinations thereof (See, e.g., Buchscher et al., J. Virol. 66:2731-2739 (1992); Johann et al., J. Virol. 66:1635-1640 (1992); Sommnerfelt et al., Virol. 176:58-59 (1990); Wilson et al., J. Virol. 63:2374-2378 (1989); Miller et al., J. Virol. 65:2220-2224 (1991); PCT/US94/05700).

[0847] Retroviral vectors, especially lentiviral vectors, can require polynucleotide sequences smaller than a given length for efficient integration into a target cell. For example, retroviral vectors of length greater than 9 kb can result in low viral titers compared with those of smaller size. In some aspects, a base editor of the present disclosure is of sufficient size so as to enable efficient packaging and delivery into a target cell via a retroviral vector. In some embodiments, a base editor is of a size so as to allow efficient packing and delivery even when expressed together with a guide nucleic acid and/or other components of a targetable nuclease system.

[0848] Packaging cells are typically used to form virus particles that are capable of infecting a host cell. Such cells include 293 cells, which package adenovirus, and psi.2 cells or PA317 cells, which package retrovirus. Viral vectors used in gene therapy are usually generated by producing a cell line that packages a nucleic acid vector into a viral particle. The vectors typically contain the minimal viral sequences required for packaging and subsequent integration into a host, other viral sequences being replaced by an expression cassette for the polynucleotide(s) to be expressed. The missing viral functions are typically supplied in trans by the packaging cell line. For example, Adeno-associated virus (“AAV”) vectors used in gene therapy typically only possess ITR sequences from the AAV genome which are required for packaging and integration into the host genome. Viral DNA can be packaged in a cell line, which contains a helper plasmid encoding the other AAV genes, namely rep and cap, but lacking ITR sequences. The cell line can also be infected with adenovirus as a helper. The helper virus can promote replication of the AAV vector and expression of AAV genes from the helper plasmid. The helper plasmid in some cases is not packaged in significant amounts due to a lack of ITR sequences. Contamination with adenovirus can be reduced by, e.g., heat treatment to which adenovirus is more sensitive than AAV.

[0849] In applications where transient expression is preferred, adenoviral based systems can be used. Adenoviral based vectors are capable of very high transduction efficiency in many cell types and do not require cell division. With such vectors, high titer and levels of expression have been obtained. This vector can be produced in large quantities in a relatively simple system. Adeno-associated virus (“AAV”) vectors can also be used to transduce cells with target nucleic acids, e.g., in the in vitro production of nucleic acids and peptides, and for in vivo and ex vivo gene therapy procedures (See, e.g., West et al., Virology 160:38-47 (1987); U.S. Pat. No. 4,797,368; WO 93/24641; Kotin, Human Gene Therapy 5:793-801 (1994); Muzyczka, J. Clin. Invest. 94:1351 (1994). The construction of recombinant AAV vectors is described in a number of publications, including U.S. Pat. No. 5,173,414; Tratschin et al., Mol. Cell. Biol. 5:3251-3260 (1985); Tratschin, et al., Mol. Cell. Biol. 4:2072-2081 (1984); Hermonat & Muzyczka, PNAS 81:6466-6470 (1984); and Samulski et al., J. Virol. 63:03822-3828 (1989).

[0850] In some embodiments, AAV vectors are used to transduce a cell of interest with a polynucleotide encoding a base editor or base editor system as provided herein. AAV is a small, single-stranded DNA dependent virus belonging to the parvovirus family. The 4.7 kb wild-type (wt) AAV genome is made up of two genes that encode four replication proteins and three capsid proteins, respectively, and is flanked on either side by 145-bp inverted terminal repeats (ITRs). The virion is composed of three capsid proteins, Vp1, Vp2, and Vp3, produced in a 1:1:10 ratio from the same open reading frame but from differential splicing (Vp1) and alternative translational start sites (Vp2 and Vp3, respectively). Vp3 is the most abundant subunit in the virion and participates in receptor recognition at the cell surface defining the tropism of the virus. A phospholipase domain, which functions in viral infectivity, has been identified in the unique N terminus of Vp1.

[0851] Similar to wt AAV, recombinant AAV (rAAV) utilizes the cis-acting 145-bp ITRs to flank vector transgene cassettes, providing up to 4.5 kb for packaging of foreign DNA. Subsequent to infection, rAAV can express a fusion protein of the invention and persist without integration into the host genome by existing episomally in circular head-to-tail concatemers. Although there are numerous examples of rAAV success using this system, in vitro and in vivo, the limited packaging capacity has limited the use of AAV-mediated gene delivery when the length of the coding sequence of the gene is equal or greater in size than the wt AAV genome.

[0852] Viral vectors can be selected based on the application. For example, for in vivo gene delivery, AAV can be advantageous over other viral vectors. In some embodiments, AAV allows low toxicity, which can be due to the purification method not requiring ultra-centrifugation of cell particles that can activate the immune response. In some embodiments, AAV allows low probability of causing insertional mutagenesis because it doesn't integrate into the host genome. Adenoviruses are commonly used as vaccines because of the strong immunogenic response they induce. Packaging capacity of the viral vectors can limit the size of the base editor that can be packaged into the vector.

[0853] AAV has a packaging capacity of about 4.5 Kb or 4.75 Kb including two 145 base inverted terminal repeats (ITRs). This means disclosed base editor as well as a promoter and transcription terminator can fit into a single viral vector. Constructs larger than 4.5 or 4.75 Kb can lead to significantly reduced virus production. For example, SpCas9 is quite large, the gene itself is over 4.1 Kb, which makes it difficult for packing into AAV. Therefore, embodiments of the present disclosure include utilizing a disclosed base editor which is shorter in length than conventional base editors. In some examples, the base editors are less than 4 kb. Disclosed base editors can be less than 4.5 kb, 4.4 kb, 4.3 kb, 4.2 kb, 4.1 kb, 4 kb, 3.9 kb, 3.8 kb, 3.7 kb, 3.6 kb, 3.5 kb, 3.4 kb, 3.3 kb, 3.2 kb, 3.1 kb, 3 kb, 2.9 kb, 2.8 kb, 2.7 kb, 2.6 kb, 2.5 kb, 2 kb, or 1.5 kb. In some embodiments, the disclosed base editors are 4.5 kb or less in length.

[0854] An AAV can be AAV1, AAV2, AAV5 or any combination thereof. One can select the type of AAV with regard to the cells to be targeted; e.g., one can select AAV serotypes 1, 2, 5 or a hybrid capsid AAV1, AAV2, AAV5 or any combination thereof for targeting brain or neuronal cells; and one can select AAV4 for targeting cardiac tissue. AAV8 is useful for delivery to the liver. A tabulation of certain AAV serotypes as to these cells can be found in Grimm, D. et al, J. Virol. 82: 5887-5911 (2008)).

[0855] In some embodiments, lentiviral vectors are used to transduce a cell of interest with a polynucleotide encoding a base editor system. Lentiviruses are complex retroviruses that have the ability to infect and express their genes in both mitotic and post-mitotic cells. The most commonly known lentivirus is the human immunodeficiency virus (HIV), which uses the envelope glycoproteins of other viruses to target a broad range of cell types.

[0856] Lentiviruses can be prepared as follows. After cloning pCasES10 (which contains a lentiviral transfer plasmid backbone), HEK293FT at low passage (p=5) were seeded in a T-75 flask to 50% confluence the day before transfection in DMEM with 10% fetal bovine serum and without antibiotics. After 20 hours, media is changed to OptiMEM (serum-free) media and transfection was done 4 hours later. Cells are transfected with 10 μg of lentiviral transfer plasmid (pCasES10) and the following packaging plasmids: 5 μg of pMD2.G (VSV-g pseudotype), and 7.5 μg of psPAX2 (gag/pol/rev/tat). Transfection can be done in 4 mL OptiMEM with a cationic lipid delivery agent (50 μl Lipofectamine 2000 and 100 μl Plus reagent). After 6 hours, the media is changed to antibiotic-free DMEM with 10% fetal bovine serum. These methods use serum during cell culture, but serum-free methods are preferred.

[0857] Lentivirus can be purified as follows. Viral supernatants are harvested after 48 hours. Supernatants are first cleared of debris and filtered through a 0.45 μm low protein binding (PVDF) filter. They are then spun in an ultracentrifuge for 2 hours at 24,000 rpm. Viral pellets are resuspended in 50 μl of DMEM overnight at 4° C. They are then aliquoted and immediately frozen at −80° C.

[0858] In another embodiment, minimal non-primate lentiviral vectors based on the equine infectious anemia virus (EIAV) are also contemplated. In another embodiment, RetinoStat®, an equine infectious anemia virus-based lentiviral gene therapy vector that expresses angiostatic proteins endostatin and angiostatin that is contemplated to be delivered via a subretinal injection. In another embodiment, use of self-inactivating lentiviral vectors are contemplated.

[0859] Any RNA of the systems, for example a guide RNA or a base editor-encoding mRNA, can be delivered in the form of RNA. Base editor-encoding mRNA can be generated using in vitro transcription. For example, nuclease mRNA can be synthesized using a PCR cassette containing the following elements: T7 promoter, optional kozak sequence (GCCACC), nuclease sequence, and 3′ UTR such as a 3′ UTR from beta globin-polyA tail. The cassette can be used for transcription by T7 polymerase. Guide polynucleotides (e.g., gRNA) can also be transcribed using in vitro transcription from a cassette containing a T7 promoter, followed by the sequence “GG”, and guide polynucleotide sequence.

[0860] To enhance expression and reduce possible toxicity, the base editor-coding sequence and/or the guide nucleic acid can be modified to include one or more modified nucleoside e.g. using pseudo-U or 5-Methyl-C.

[0861] The small packaging capacity of AAV vectors makes the delivery of a number of genes that exceed this size and/or the use of large physiological regulatory elements challenging. These challenges can be addressed, for example, by dividing the protein(s) to be delivered into two or more fragments, wherein the N-terminal fragment is fused to a split intein-N and the C-terminal fragment is fused to a split intein-C. These fragments are then packaged into two or more AAV vectors. As used herein, “intein” refers to a self-splicing protein intron (e.g., peptide) that ligates flanking N-terminal and C-terminal exteins (e.g., fragments to be joined). The use of certain inteins for joining heterologous protein fragments is described, for example, in Wood et al., J. Biol. Chem. 289(21); 14512-9 (2014). For example, when fused to separate protein fragments, the inteins IntN and IntC recognize each other, splice themselves out and simultaneously ligate the flanking N- and C-terminal exteins of the protein fragments to which they were fused, thereby reconstituting a full-length protein from the two protein fragments. Other suitable inteins will be apparent to a person of skill in the art.

[0862] A fragment of a fusion protein of the invention can vary in length. In some embodiments, a protein fragment ranges from 2 amino acids to about 1000 amino acids in length. In some embodiments, a protein fragment ranges from about 5 amino acids to about 500 amino acids in length. In some embodiments, a protein fragment ranges from about 20 amino acids to about 200 amino acids in length. In some embodiments, a protein fragment ranges from about 10 amino acids to about 100 amino acids in length. Suitable protein fragments of other lengths will be apparent to a person of skill in the art.

[0863] In one embodiment, dual AAV vectors are generated by splitting a large transgene expression cassette in two separate halves (5′ and 3′ ends, or head and tail), where each half of the cassette is packaged in a single AAV vector (of <5 kb). The re-assembly of the full-length transgene expression cassette is then achieved upon co-infection of the same cell by both dual AAV vectors followed by: (1) homologous recombination (HR) between 5′ and 3′ genomes (dual AAV overlapping vectors); (2) ITR-mediated tail-to-head concatemerization of 5′ and 3′ genomes (dual AAV trans-splicing vectors); or (3) a combination of these two mechanisms (dual AAV hybrid vectors). The use of dual AAV vectors in vivo results in the expression of full-length proteins. The use of the dual AAV vector platform represents an efficient and viable gene transfer strategy for transgenes of >4.7 kb in size.

### Inteins

[0864] Inteins (intervening protein) are auto-processing domains found in a variety of diverse organisms, which carry out a process known as protein splicing. Protein splicing is a multi-step biochemical reaction comprised of both the cleavage and formation of peptide bonds. While the endogenous substrates of protein splicing are proteins found in intein-containing organisms, inteins can also be used to chemically manipulate virtually any polypeptide backbone.

[0865] In protein splicing, the intein excises itself out of a precursor polypeptide by cleaving two peptide bonds, thereby ligating the flanking extein (external protein) sequences via the formation of a new peptide bond. This rearrangement occurs post-translationally (or possibly co-translationally). Intein-mediated protein splicing occurs spontaneously, requiring only the folding of the intein domain.

[0866] About 5% of inteins are split inteins, which are transcribed and translated as two separate polypeptides, the N-intein and C-intein, each fused to one extein. Upon translation, the intein fragments spontaneously and non-covalently assemble into the canonical intein structure to carry out protein splicing in trans. The mechanism of protein splicing entails a series of acyl-transfer reactions that result in the cleavage of two peptide bonds at the intein-extein junctions and the formation of a new peptide bond between the N- and C-exteins. This process is initiated by activation of the peptide bond joining the N-extein and the N-terminus of the intein. Virtually all inteins have a cysteine or serine at their N-terminus that attacks the carbonyl carbon of the C-terminal N-extein residue. This N to O/S acyl-shift is facilitated by a conserved threonine and histidine (referred to as the TXXH motif (SEQ ID NO:374)), along with a commonly found aspartate, which results in the formation of a linear (thio)ester intermediate. Next, this intermediate is subject to trans-(thio)esterification by nucleophilic attack of the first C-extein residue (+1), which is a cysteine, serine, or threonine. The resulting branched (thio)ester intermediate is resolved through a unique transformation: cyclization of the highly conserved C-terminal asparagine of the intein. This process is facilitated by the histidine (found in a highly conserved HNF motif) and the penultimate histidine and may also involve the aspartate. This succinimide formation reaction excises the intein from the reactive complex and leaves behind the exteins attached through a non-peptidic linkage. This structure rapidly rearranges into a stable peptide bond in an intein-independent fashion.

[0867] Non-limiting examples of inteins include any intein or intein-pair known in the art, which include a synthetic intein based on the dnaE intein, the Cfa-N(e.g., split intein-N) and Cfa-C (e.g., split intein-C) intein pair, has been described (e.g., in Stevens et al., J Am Chem Soc. 2016 Feb. 24; 138(7):2162-5, incorporated herein by reference), and DnaE. Non-limitine examples of pairs of inteins that may be used in accordance with the present disclosure include: Cfa DnaE intein, Ssp GyrB intein, Ssp DnaX intein, Ter DnaE3 intein, Ter ThyX intein, Rma DnaB intein and Cne Prp8 intein (e.g., as described in U.S. Pat. No. 8,394,604, incorporated herein by reference). Exemplary nucleotide and amino acid sequences of inteins are provided in the Sequence Listing at SEQ ID NOs: 375-382.

[0868] Intein-N and intein-C may be fused to the N-terminal portion of a split Cas9 and the C-terminal portion of the split Cas9, respectively, for the joining of the N-terminal portion of the split Cas9 and the C-terminal portion of the split Cas9. For example, in some embodiments, an intein-N is fused to the C-terminus of the N-terminal portion of the split Cas9, i.e., to form a structure of N-[N-terminal portion of the split Cas9]-[intein-N]-C. In some embodiments, an intein-C is fused to the N-terminus of the C-terminal portion of the split Cas9, i.e., to form a structure of N-[intein-C]-[C-terminal portion of the split Cas9]-C. The mechanism of intein-mediated protein splicing for joining the proteins the inteins are fused to (e.g., split Cas9) is known in the art, e.g., as described in Shah et al., Chem Sci. 2014; 5(1):446-461, incorporated herein by reference. Methods for designing and using inteins are known in the art and described, for example by WO2014004336, WO2017132580, US20150344549, and US20180127780, each of which is incorporated herein by reference in their entirety.

[0869] In some embodiments, a portion or fragment of a nuclease (e.g., Cas9) is fused to an intein. The nuclease can be fused to the N-terminus or the C-terminus of the intein. In some embodiments, a portion or fragment of a fusion protein is fused to an intein and fused to an AAV capsid protein. The intein, nuclease and capsid protein can be fused together in any arrangement (e.g., nuclease-intein-capsid, intein-nuclease-capsid, capsid-intein-nuclease, etc.). In some embodiments, an N-terminal fragment of a base editor (e.g., ABE, CBE) is fused to a split intein-N and a C-terminal fragment is fused to a split intein-C. These fragments are then packaged into two or more AAV vectors. In some embodiments, the N-terminus of an intein is fused to the C-terminus of a fusion protein and the C-terminus of the intein is fused to the N-terminus of an AAV capsid protein.

[0870] In one embodiment, inteins are utilized to join fragments or portions of a cytidine or adenosine base editor protein that is grafted onto an AAV capsid protein. The use of certain inteins for joining heterologous protein fragments is described, for example, in Wood et al., J. Biol. Chem. 289(21); 14512-9 (2014). For example, when fused to separate protein fragments, the inteins IntN and IntC recognize each other, splice themselves out and simultaneously ligate the flanking N- and C-terminal exteins of the protein fragments to which they were fused, thereby reconstituting a full-length protein from the two protein fragments. Other suitable inteins will be apparent to a person of skill in the art.

[0871] In some embodiments, an ABE was split into N- and C-terminal fragments at Ala, Ser, Thr, or Cys residues within selected regions of SpCas9. These regions correspond to loop regions identified by Cas9 crystal structure analysis.

[0872] The N-terminus of each fragment is fused to an intein-N and the C-terminus of each fragment is fused to an intein C at amino acid positions S303, T310, T313, S355, A456, S460, A463, T466, S469, T472, T474, C574, S577, A589, and S590, which are indicated in capital letters in the sequence below (called the “Cas9 reference sequence”).

| (SEQ ID NO: 201) | |
|---|---|
| 1 | mdkkysigld igtnsvgwav itdeykvpsk kfkvlgntdr hsikknliga llfdsgetae |
| 61 | atrlkrtarr rytrrknric ylqeifsnem akvddsffhr leesflveed kkherhpifg |
| 121 | nivdevayhe kyptiyhlrk klvdstdkad lrliylalah mikfrghfli egdlnpdnsd |
| 181 | vdklfiqlvq tynqlfeenp inasgvdaka ilsarlsksr rlenliaqlp gekknglfgn |
| 241 | lialslgltp nfksnfdlae daklqlskdt ydddldnlla qigdqyadlf laaknlsdai |
| 301 | llSdilrvnT eiTkaplsas mikrydehhq dltllkalvr qqlpekykei ffdqSkngya |
| 361 | gyidggasqe efykfikpil ekmdgteell vklnredllr kqrtfdngsi phqihlgelh |
| 421 | ailrrqedfy pflkdnreki ekiltfripy yvgplArgnS rfAwmTrkSe eTiTpwnfee |
| 481 | vvdkgasaqs fiermtnfdk nlpnekvlpk hsllyeyftv yneltkvkyv tegmrkpafl |
| 541 | sgeqkkaivd llfktnrkvt vkqlkedyfk kieCfdSvei sgvedrfnAS lgtyhdllki |
| 601 | ikdkdfldne enedilediv ltltlfedre mieerlktya hlfddkvmkq lkrrrytgwg |
| 661 | rlsrklingi rdkqsgktil dflksdgfan rnfmqlihdd sltfkediqk aqvsgqgdsl |
| 721 | hehianlags paikkgilqt vkvvdelvkv mgrhkpeniv iemarenqtt qkgqknsrer |
| 781 | mkrieegike lgsqilkehp ventqlqnek lylyylqngr dmyvdgeldi nrlsdydvdh |
| 841 | ivpqsflkdd sidnkvltrs dknrgksdnv pseevvkkmk nywrqllnak litqrkfdnl |
| 901 | tkaergglse ldkagfikrq lvetrqitkh vaqildsrmn tkydendkli revkvitlks |
| 961 | klvsdfrkdf qfykvreinn yhhahdayln avvgtalikk ypklesefvy gdykvydvrk |
| 1021 | miakseqeig katakyffys nimnffktei tlangeirkr plietngetg eivwdkgrdf |
| 1081 | atvrkvlsmp qvnivkktev qtggfskesi lpkrnsdkli arkkdwdpkk yggfdsptva |
| 1141 | ysvlvvakve kgkskklksv kellgitime rssfeknpid fleakgykev kkdliiklpk |
| 1201 | yslfelengr krmlasagel qkgnelalps kyvnflylas hyeklkgspe dneqkqlfve |
| 1261 | qhkhyldeii eqisefskrv iladanldkv lsaynkhrdk pireqaenii hlftltnlga |
| 1321 | paafkyfdtt idrkrytstk evldatlihq sitglyetri dlsqlggd |

### Pharmaceutical Compositions

[0873] In some aspects, the present invention provides a pharmaceutical composition comprising any of the genetically modified cells, base editors, fusion proteins, or the fusion protein-guide polynucleotide complexes described herein

[0874] The pharmaceutical compositions of the present invention can be prepared in accordance with known techniques. See, e.g., Remington, The Science And Practice of Pharmacy (21st ed. 2005). In general, the cell, or population thereof is admixed with a suitable carrier prior to administration or storage, and in some embodiments, the pharmaceutical composition further comprises a pharmaceutically acceptable carrier. Suitable pharmaceutically acceptable carriers generally comprise inert substances that aid in administering the pharmaceutical composition to a subject, aid in processing the pharmaceutical compositions into deliverable preparations, or aid in storing the pharmaceutical composition prior to administration. Pharmaceutically acceptable carriers can include agents that can stabilize, optimize or otherwise alter the form, consistency, viscosity, pH, pharmacokinetics, solubility of the formulation. Such agents include buffering agents, wetting agents, emulsifying agents, diluents, encapsulating agents, and skin penetration enhancers. For example, carriers can include, but are not limited to, saline, buffered saline, dextrose, arginine, sucrose, water, glycerol, ethanol, sorbitol, dextran, sodium carboxymethyl cellulose, and combinations thereof.

[0875] Some nonlimiting examples of materials which can serve as pharmaceutically-acceptable carriers include: (1) sugars, such as lactose, glucose and sucrose; (2) starches, such as corn starch and potato starch; (3) cellulose, and its derivatives, such as sodium carboxymethyl cellulose, methylcellulose, ethyl cellulose, microcrystalline cellulose and cellulose acetate; (4) powdered tragacanth; (5) malt; (6) gelatin; (7) lubricating agents, such as magnesium stearate, sodium lauryl sulfate and talc; (8) excipients, such as cocoa butter and suppository waxes; (9) oils, such as peanut oil, cottonseed oil, safflower oil, sesame oil, olive oil, corn oil and soybean oil; (10) glycols, such as propylene glycol; (11) polyols, such as glycerin, sorbitol, mannitol and polyethylene glycol (PEG); (12) esters, such as ethyl oleate and ethyl laurate; (13) agar; (14) buffering agents, such as magnesium hydroxide and aluminum hydroxide; (15) alginic acid; (16) pyrogen-free water; (17) isotonic saline; (18) Ringer's solution; (19) ethyl alcohol; (20) pH buffered solutions; (21) polyesters, polycarbonates and/or polyanhydrides; (22) bulking agents, such as polypeptides and amino acids (23) serum alcohols, such as ethanol; and (23) other non-toxic compatible substances employed in pharmaceutical formulations. Wetting agents, coloring agents, release agents, coating agents, sweetening agents, flavoring agents, perfuming agents, preservative and antioxidants can also be present in the formulation.

[0876] Pharmaceutical compositions can comprise one or more pH buffering compounds to maintain the pH of the formulation at a predetermined level that reflects physiological pH, such as in the range of about 5.0 to about 8.0. The pH buffering compound used in the aqueous liquid formulation can be an amino acid or mixture of amino acids, such as histidine or a mixture of amino acids such as histidine and glycine. Alternatively, the pH buffering compound is preferably an agent which maintains the pH of the formulation at a predetermined level, such as in the range of about 5.0 to about 8.0, and which does not chelate calcium ions. Illustrative examples of such pH buffering compounds include, but are not limited to, imidazole and acetate ions. The pH buffering compound may be present in any amount suitable to maintain the pH of the formulation at a predetermined level.

[0877] Pharmaceutical compositions can also contain one or more osmotic modulating agents, i.e., a compound that modulates the osmotic properties (e.g., tonicity, osmolality, and/or osmotic pressure) of the formulation to a level that is acceptable to the blood stream and blood cells of recipient individuals. The osmotic modulating agent can be an agent that does not chelate calcium ions. The osmotic modulating agent can be any compound known or available to those skilled in the art that modulates the osmotic properties of the formulation. One skilled in the art may empirically determine the suitability of a given osmotic modulating agent for use in the inventive formulation. Illustrative examples of suitable types of osmotic modulating agents include, but are not limited to: salts, such as sodium chloride and sodium acetate; sugars, such as sucrose, dextrose, and mannitol; amino acids, such as glycine; and mixtures of one or more of these agents and/or types of agents. The osmotic modulating agent(s) may be present in any concentration sufficient to modulate the osmotic properties of the formulation.

[0878] In addition to a modified cell, or population thereof, and a carrier, the pharmaceutical compositions of the present invention can include at least one additional therapeutic agent useful in the treatment of disease. For example, some embodiments of the pharmaceutical composition described herein further comprises a chemotherapeutic agent. In some embodiments, the pharmaceutical composition further comprises a cytokine peptide or a nucleic acid sequence encoding a cytokine peptide. In some embodiments, the pharmaceutical compositions comprising the cell or population thereof can be administered separately from an additional therapeutic agent.

[0879] One consideration concerning the therapeutic use of genetically modified cells of the invention is the quantity of cells necessary to achieve an optimal or satisfactory effect. The quantity of cells to be administered may vary for the subject being treated. In one embodiment, between 10⁴ to 10¹⁰, between 10⁵ to 10⁹, or between 10⁶ and 10⁸ genetically modified cells of the invention are administered to a human subject. In some embodiments, at least about 1×10⁸, 2×10⁸, 3×10⁸, 4×10⁸, and 5×10⁸ genetically modified cells of the invention are administered to a human subject. Determining the precise effective dose may be based on factors for each individual subject, including their size, age, sex, weight, and condition. Dosages can be readily ascertained by those skilled in the art from this disclosure and the knowledge in the art.

[0880] The skilled artisan can readily determine the number of cells and amount of optional additives, vehicles, and/or carriers in compositions and to be administered in methods of the invention. Typically, additives (in addition to the cell(s)) are present in an amount of 0.001 to 50% (weight) solution in phosphate buffered saline, and the active ingredient is present in the order of micrograms to milligrams, such as about 0.0001 to about 5 wt %, preferably about 0.0001 to about 1 wt %, still more preferably about 0.0001 to about 0.05 wt % or about 0.001 to about 20 wt %, preferably about 0.01 to about 10 wt %, and still more preferably about 0.05 to about 5 wt %. Of course, for any composition to be administered to an animal or human, and for any particular method of administration, it is preferred to determine therefore: toxicity, such as by determining the lethal dose (LD) and LD50 in a suitable animal model (e.g., a rodent such as a mouse); and, the dosage of the composition(s), concentration of components therein, and the timing of administering the composition(s), which elicit a suitable response. Such determinations do not require undue experimentation from the knowledge of the skilled artisan, this disclosure and the documents cited herein. And, the time for sequential administrations can be ascertained without undue experimentation.

[0881] In some embodiments, the pharmaceutical composition is formulated for delivery to a subject. Suitable routes of administrating the pharmaceutical composition described herein include, without limitation: topical, subcutaneous, transdermal, intradermal, intralesional, intraarticular, intraperitoneal, intravesical, transmucosal, gingival, intradental, intracochlear, transtympanic, intraorgan, epidural, intrathecal, intramuscular, intravenous, intravascular, intraosseus, periocular, intratumoral, intracerebral, and intracerebroventricular administration.

[0882] In some embodiments, the pharmaceutical composition described herein is administered locally to a diseased site (e.g., a liver). In some embodiments, the pharmaceutical composition described herein is administered to a subject by injection, by means of a catheter, by means of a suppository, or by means of an implant, the implant being of a porous, non-porous, or gelatinous material, including a membrane, such as a sialastic membrane, or a fiber.

[0883] In other embodiments, the pharmaceutical composition described herein is delivered in a controlled release system. In one embodiment, a pump can be used (see, e.g., Langer, 1990, Science 249: 1527-1533; Sefton, 1989, CRC Crit. Ref. Biomed. Eng. 14:201; Buchwald et al., 1980, Surgery 88:507; Saudek et al., 1989, N. Engl. J. Med. 321:574). In another embodiment, polymeric materials can be used. (See, e.g., Medical Applications of Controlled Release (Langer and Wise eds., CRC Press, Boca Raton, Fla., 1974); Controlled Drug Bioavailability, Drug Product Design and Performance (Smolen and Ball eds., Wiley, New York, 1984); Ranger and Peppas, 1983, Macromol. Sci. Rev. Macromol. Chem. 23:61. See also Levy et al., 1985, Science 228: 190; During et al., 1989, Ann. Neurol. 25:351; Howard et al., 1989, J. Neurosurg. 71: 105.) Other controlled release systems are discussed, for example, in Langer, supra.

[0884] In some embodiments, the pharmaceutical composition is formulated in accordance with routine procedures as a composition adapted for intravenous or subcutaneous administration to a subject, e.g., a human. In some embodiments, pharmaceutical composition for administration by injection are solutions in sterile isotonic use as solubilizing agent and a local anesthetic such as lignocaine to ease pain at the site of the injection. Generally, the ingredients are supplied either separately or mixed together in unit dosage form, for example, as a dry lyophilized powder or water free concentrate in a hermetically sealed container such as an ampoule or sachette indicating the quantity of active agent. Where the pharmaceutical is to be administered by infusion, it can be dispensed with an infusion bottle containing sterile pharmaceutical grade water or saline. Where the pharmaceutical composition is administered by injection, an ampoule of sterile water for injection or saline can be provided so that the ingredients can be mixed prior to administration.

[0885] A pharmaceutical composition for systemic administration can be a liquid, e.g., sterile saline, lactated Ringer's or Hank's solution. In addition, the pharmaceutical composition can be in solid forms and re-dissolved or suspended immediately prior to use. Lyophilized forms are also contemplated. The pharmaceutical composition can be contained within a lipid particle or vesicle, such as a liposome or microcrystal, which is also suitable for parenteral administration. The particles can be of any suitable structure, such as unilamellar or plurilamellar, so long as compositions are contained therein. Compounds can be entrapped in “stabilized plasmid-lipid particles” (SPLP) containing the fusogenic lipid dioleoylphosphatidylethanolamine (DOPE), low levels (5-10 mol %) of cationic lipid, and stabilized by a polyethyleneglycol (PEG) coating (Zhang Y. P. et al., Gene Ther. 1999, 6: 1438-47). Positively charged lipids such as N-[1-(2,3-dioleoyloxi)propyl]-N,N,N-trimethyl-amoniummethylsulfate, or “DOTAP,” are particularly preferred for such particles and vesicles. The preparation of such lipid particles is well known. See, e.g., U.S. Pat. Nos. 4,880,635; 4,906,477; 4,911,928; 4,917,951; 4,920,016; and 4,921,757; each of which is incorporated herein by reference.

[0886] The pharmaceutical composition described herein can be administered or packaged as a unit dose, for example. The term “unit dose” when used in reference to a pharmaceutical composition of the present disclosure refers to physically discrete units suitable as unitary dosage for the subject, each unit containing a predetermined quantity of active material calculated to produce the desired therapeutic effect in association with the required diluent; i.e., carrier, or vehicle.

[0887] Further, the pharmaceutical composition can be provided as a pharmaceutical kit comprising (a) a container containing a compound of the invention in lyophilized form and (b) a second container containing a pharmaceutically acceptable diluent (e.g., sterile used for reconstitution or dilution of the lyophilized compound of the invention. Optionally associated with such container(s) can be a notice in the form prescribed by a governmental agency regulating the manufacture, use or sale of pharmaceuticals or biological products, which notice reflects approval by the agency of manufacture, use or sale for human administration.

[0888] In another aspect, an article of manufacture containing materials useful for the treatment of the diseases described above is included. In some embodiments, the article of manufacture comprises a container and a label. Suitable containers include, for example, bottles, vials, syringes, and test tubes. The containers can be formed from a variety of materials such as glass or plastic. In some embodiments, the container holds a composition that is effective for treating a disease described herein and can have a sterile access port. For example, the container can be an intravenous solution bag or a vial having a stopper pierceable by a hypodermic injection needle. The active agent in the composition is a compound of the invention. In some embodiments, the label on or associated with the container indicates that the composition is used for treating the disease of choice. The article of manufacture can further comprise a second container comprising a pharmaceutically-acceptable buffer, such as phosphate-buffered saline, Ringer's solution, or dextrose solution. It can further include other materials desirable from a commercial and user standpoint, including other buffers, diluents, filters, needles, syringes, and package inserts with instructions for use.

[0889] In some embodiments, any of the fusion proteins, gRNAs, and/or complexes described herein are provided as part of a pharmaceutical composition. In some embodiments, the pharmaceutical composition comprises any of the fusion proteins provided herein. In some embodiments, the pharmaceutical composition comprises any of the complexes provided herein. In some embodiments, the pharmaceutical composition comprises a ribonucleoprotein complex comprising an RNA-guided nuclease (e.g., Cas9) that forms a complex with a gRNA and a cationic lipid. In some embodiments pharmaceutical composition comprises a gRNA, a nucleic acid programmable DNA binding protein, a cationic lipid, and a pharmaceutically acceptable excipient. Pharmaceutical compositions can optionally comprise one or more additional therapeutically active substances.

[0890] In some embodiments, compositions provided herein are administered to a subject, for example, to a human subject, in order to effect a targeted genomic modification within the subject. In some embodiments, cells are obtained from the subject and contacted with any of the pharmaceutical compositions provided herein. In some embodiments, cells removed from a subject and contacted ex vivo with a pharmaceutical composition are re-introduced into the subject, optionally after the desired genomic modification has been effected or detected in the cells. Methods of delivering pharmaceutical compositions comprising nucleases are known, and are described, for example, in U.S. Pat. Nos. 6,453,242; 6,503,717; 6,534,261; 6,599,692; 6,607,882; 6,689,558; 6,824,978; 6,933,113; 6,979,539; 7,013,219; and 7,163,824, the disclosures of all of which are incorporated by reference herein in their entireties. Although the descriptions of pharmaceutical compositions provided herein are principally directed to pharmaceutical compositions which are suitable for administration to humans, it will be understood by the skilled artisan that such compositions are generally suitable for administration to animals or organisms of all sorts, for example, for veterinary use.

[0891] Modification of pharmaceutical compositions suitable for administration to humans in order to render the compositions suitable for administration to various animals is well understood, and the ordinarily skilled veterinary pharmacologist can design and/or perform such modification with merely ordinary, if any, experimentation. Subjects to which administration of the pharmaceutical compositions is contemplated include, but are not limited to, humans and/or other primates; mammals, domesticated animals, pets, and commercially relevant mammals such as cattle, pigs, horses, sheep, cats, dogs, mice, and/or rats; and/or birds, including commercially relevant birds such as chickens, ducks, geese, and/or turkeys.

[0892] Formulations of the pharmaceutical compositions described herein can be prepared by any method known or hereafter developed in the art of pharmacology. In general, such preparatory methods include the step of bringing the active ingredient(s) into association with an excipient and/or one or more other accessory ingredients, and then, if necessary and/or desirable, shaping and/or packaging the product into a desired single- or multi-dose unit. Pharmaceutical formulations can additionally comprise a pharmaceutically acceptable excipient, which, as used herein, includes any and all solvents, dispersion media, diluents, or other liquid vehicles, dispersion or suspension aids, surface active agents, isotonic agents, thickening or emulsifying agents, preservatives, solid binders, lubricants and the like, as suited to the particular dosage form desired. Remington's The Science and Practice of Pharmacy, 21st Edition, A. R. Gennaro (Lippincott, Williams & Wilkins, Baltimore, MD, 2006; incorporated in its entirety herein by reference) discloses various excipients used in formulating pharmaceutical compositions and known techniques for the preparation thereof. See also PCT application PCT/US2010/055131 (Publication number WO2011/053982 A8, filed Nov. 2, 2010), incorporated in its entirety herein by reference, for additional suitable methods, reagents, excipients and solvents for producing pharmaceutical compositions comprising a nuclease.

[0893] Except insofar as any conventional excipient medium is incompatible with a substance or its derivatives, such as by producing any undesirable biological effect or otherwise interacting in a deleterious manner with any other component(s) of the pharmaceutical composition, its use is contemplated to be within the scope of this disclosure.

[0894] The compositions, as described above, can be administered in effective amounts. The effective amount will depend upon the mode of administration, the particular condition being treated, and the desired outcome. It may also depend upon the stage of the condition, the age and physical condition of the subject, the nature of concurrent therapy, if any, and like factors well-known to the medical practitioner. For therapeutic applications, it is that amount sufficient to achieve a medically desirable result.

[0895] In some embodiments, compositions in accordance with the present disclosure can be used for treatment of any of a variety of diseases, disorders, and/or conditions.

### Methods of Treatment

[0896] Some aspects of the present invention provide methods of treating a subject having or having a propensity to develop amyloidosis, the method comprising administering to a subject in need an effective therapeutic amount of a pharmaceutical composition as described herein. In some embodiments, the methods of the invention comprise expressing or introducing into a cell of a subject a base editor polypeptide and one or more guide RNAs capable of targeting a nucleic acid molecule encoding a transthyretin polypeptide comprising a pathogenic mutation.

[0897] One of ordinary skill in the art would recognize that multiple administrations of the pharmaceutical compositions contemplated in particular embodiments may be required to affect the desired therapy. For example, a composition may be administered to the subject 1, 2, 3, 4, 5, 6, 7, 8, 9, or 10 or more times over a span of 1 week, 2 weeks, 3 weeks, 1 month, 2 months, 3 months, 4 months, 5 months, 6 months, 1 year, 2 years, 5, years, 10 years, or more. In any of such methods, the methods may comprise administering to the subject an effective amount of an edited cell or a base editor system or polynucleotide encoding such system. In any of such methods, the methods may comprise administering one or more doses of an effective amount of the edited cells per day. In any of such methods, the methods may comprise administering two or more doses of an effective amount of the edited cells per day. In any of such methods, the methods may comprise administering three or more doses of an effective amount of the edited cells per day. In any of such methods, the methods may comprise administering one or more doses of an effective amount of the edited cells per week. In any of such methods, the methods may comprise administering two or more doses of an effective amount of the edited cells per week. In any of such methods, the methods may comprise administering three or more doses of an effective amount of the edited cells per week. In any of such methods, the methods may comprise administering one or more doses of an effective amount of the edited cells per month. In any of such methods, the methods may comprise administering two or more doses of an effective amount of the edited cells per month. In any of such methods, the methods may comprise administering three or more doses of an effective amount of the edited cells per month.

[0898] Administration of the pharmaceutical compositions contemplated herein may be carried out using conventional techniques including, but not limited to, infusion, transfusion, or parenterally. In some embodiments, parenteral administration includes infusing or injecting intravascularly, intravenously, intramuscularly, intraarterially, intrathecally, intratumorally, intradermally, intraperitoneally, transtracheally, subcutaneously, subcuticularly, intraarticularly, subcapsularly, subarachnoidly and intrasternally.

[0899] In some embodiments, a composition described herein (e.g., edited cell, base editor system) is administered in a dosage that is about 0.5-30 mg per kilogram body weight of the human subject. In another embodiment, the amount of the composition administered is about 0.5-20 mg per kilogram body weight of the human subject. In another embodiment, the amount of the composition administered is about 0.5-10 mg per kilogram body weight of the human subject. In another embodiment, the amount of the composition administered is about 0.04 mg, about 0.08 mg, about 0.16 mg, about 0.32 mg, about 0.64 mg, about 1.25 mg, about 1.28 mg, about 1.92 mg, about 2.5 mg, about 3.56 mg, about 3.75 mg, about 5.0 mg, about 7.12 mg, about 7.5 mg, about 10 mg, about 14.24 mg, about 15 mg, about 20 mg, or about 30 mg per kilogram body weight of the human subject. In another embodiment, the amount of the compo composition und administered is about 1.92 mg, about 3.75 mg, about 7.5 mg, about 15.0 mg, or about 30.0 mg per kilogram body weight of the human subject and the composition is administered two times a week. In another embodiment, the amount of the composition administered is about 1.28 mg, about 2.56 mg, about 5.0 mg, about 10 mg, or about 20 mg per kilogram body weight of the human subject and the composition is administered two times a week. In another embodiment, the amount of the composition administered is about 1.92 mg, about 3.75 mg, about 7.5 mg, about 15.0 mg, or about 30.0 mg per kilogram body weight of the human subject and the composition is administered once a week. In another embodiment, the amount of the composition administered is about 1.28 mg, about 2.56 mg, about 5.0 mg, about 10 mg, or about 20 mg per kilogram body weight of the human subject and the composition is administered once a week. In another embodiment, the amount of the composition administered is about 1.92 mg, about 3.75 mg, about 7.5 mg, about 15.0 mg, or about 30.0 mg per kilogram body weight of the human subject and the composition is administered once a day three, five or seven times in a seven day period. In another embodiment, the composition is administered intravenously once a day, seven times in a seven day period. In another embodiment, the amount of the composition administered is about 1.28 mg, about 2.56 mg, about 5.0 mg, about 10 mg, or about 20 mg per kilogram body weight of the human subject and the composition is administered once a day three, five or seven times in a seven day period. In another embodiment, the composition is administered intravenously once a day, seven times in a seven day period.

[0900] In some embodiments, the composition is administered over a period of 0.25 h, 0.5 h, 1 h, 2 h, 3 h, 4 h, 5 h, 6 h, 7 h, 8 h, 9 h, 10 h, 11 h, or 12 h. In another embodiment, the composition is administered over a period of 0.25-2 h. In another embodiment, the composition is gradually administered over a period of 1 h. In another embodiment, the composition is gradually administered over a period of 2 h.

[0901] The treatments of the present disclosure can result in a reduction in amyloidosis in a subject. The treatments can result in a reduction or elimination of transthyretin (TTR) in cells of the subject (e.g., hepatocytes).

### Kits

[0902] The invention provides kits for the treatment of amyloidosis in a subject. In some embodiments, the kit further includes a base editor system or a polynucleotide encoding a base editor system, wherein the base editor polypeptide system a nucleic acid programmable DNA binding protein (napDNAbp), a deaminase, and a guide RNA. In some embodiments, the napDNAbp is Cas9 or Cas12. In some embodiments, the polynucleotide encoding the base editor is a mRNA sequence. In some embodiments, the deaminase is a cytidine deaminase or an adenosine deaminase. In some embodiments, the kit comprises an edited cell and instructions regarding the use of such cell.

[0903] The kits may further comprise written instructions for using the base editor system and/or edited cell. In other embodiments, the instructions include at least one of the following: precautions; warnings; clinical studies; and/or references. The instructions may be printed directly on the container (when present), or as a label applied to the container, or as a separate sheet, pamphlet, card, or folder supplied in or with the container. In a further embodiment, a kit can comprise instructions in the form of a label or separate insert (package insert) for suitable operational parameters. In yet another embodiment, the kit can comprise one or more containers with appropriate positive and negative controls or control samples, to be used as standard(s) for detection, calibration, or normalization. The kit can further comprise a second container comprising a pharmaceutically-acceptable buffer, such as (sterile) phosphate-buffered saline, Ringer's solution, or dextrose solution. It can further include other materials desirable from a commercial and user standpoint, including other buffers, diluents, filters, needles, syringes, and package inserts with instructions for use.

[0904] The practice of the present invention employs, unless otherwise indicated, conventional techniques of molecular biology (including recombinant techniques), microbiology, cell biology, biochemistry and immunology, which are well within the purview of the skilled artisan. Such techniques are explained fully in the literature, such as, “Molecular Cloning: A Laboratory Manual”, second edition (Sambrook, 1989); “Oligonucleotide Synthesis” (Gait, 1984); “Animal Cell Culture” (Freshney, 1987); “Methods in Enzymology” “Handbook of Experimental Immunology” (Weir, 1996); “Gene Transfer Vectors for Mammalian Cells” (Miller and Calos, 1987); “Current Protocols in Molecular Biology” (Ausubel, 1987); “PCR: The Polymerase Chain Reaction”, (Mullis, 1994); “Current Protocols in Immunology” (Coligan, 1991). These techniques are applicable to the production of the polynucleotides and polypeptides of the invention, and, as such, may be considered in making and practicing the invention. Particularly useful techniques for particular embodiments will be discussed in the sections that follow.

[0905] The following examples are put forth so as to provide those of ordinary skill in the art with a complete disclosure and description of how to make and use the assay, screening, and therapeutic methods of the invention, and are not intended to limit the scope of what the inventors regard as their invention.

### EXAMPLES

### Example 1. Transthyretin Gene Alterations

[0906] The guide RNAs listed in Table 1 were screened for use in editing the transthyretin (TTR) gene by disrupting splice sites (FIG. 1A-1C) or using a bhCas12b nuclease strategy (FIG. 2). 15 total guide RNAs were screened. The screen was performed by Lo-I in HEK293T cells using based editors and bhCas12b delivered as mRNA and the sgRNAs. The guide RNAs sgRNA_361 and sgRNA_362 worked well in splice site disruption (FIGS. 1A-1C) using ABE and/or BE4. Several of the gRNAs functioned well as bhCas12b nuclease gRNAs.

[0907] Sequences for the base editors indicated in FIGS. 1A-1C and the bhCas12b endonuclease are listed below in Table 20.

TABLE 20
Base editor and nuclease sequences.

| | | SEQ | |
|---|---|---|---|
| | | ID | |
| Name | Description | NO | Sequence |
| ABE8.8 | pMRNA-trilink- | 442 | MSEVEFSHEYWMRHALTLAKRARDEREVPVGAVLVLNNRVIGEGWNRAIGLHDPTA |
| | monoTadA- | | HAEIMALRQGGLVMQNYRLIDATLYVTFEPCVMCAGAMIHSRIGRVVFGVRNAKTG |
| | ABE8.8(TadA7.10 + | | AAGSLMDVLHHPGMNHRVEITEGILADECAALLCRFFRMPRRVFNAQKKAQSSTDSG |
| | H123H + Y147R + | | GSSGGSSGSETPGTSESATPESSGGSSGGSDKKYSIGLAIGTNSVGWAVITDEYKVPSK |
| | Q154R) 120A bbsI | | KFKVLGNTDRHSIKKNLIGALLFDSGETAEATRLKRTARRRYTRRKNRICYLQEIFSNE |
| | | | MAKVDDSFFHRLEESFLVEEDKKHERHPIFGNIVDEVAYHEKYPTIYHLRKKLVDSTD |
| | | | KADLRLIYLALAHMIKFRGHFLIEGDLNPDNSDVDKLFIQLVQTYNQLFEENPINASGV |
| | | | DAKAILSARLSKSRRLENLIAQLPGEKKNGLFGNLIALSLGLTPNFKSNFDLAEDAKLQ |
| | | | LSKDTYDDDLDNLLAQIGDQYADLFLAAKNLSDAILLSDILRVNTEITKAPLSASMIKR |
| | | | YDEHHQDLTLLKALVRQQLPEKYKEIFFDQSKNGYAGYIDGGASQEEFYKFIKPILEK |
| | | | MDGTEELLVKLNREDLLRKQRTFDNGSIPHQIHLGELHAILRRQEDFYPFLKDN [symbol] EKIE |
| | | | KILTFRIPYYVGPLARGNSRFAWMTRKSEETITPWNFEEVVDKGASAQSFIERM [symbol] FD |
| | | | KNLPNEKVLPKHSLLYEYFTVYNELTKVKYVTEGMRKPAFLSGEQKKAIVDLLFKTN |
| | | | RKVTVKQLKEDYFKKIECFDSVEISGVEDRFNASLGTYHDLLKIIKDKDFLDNE [symbol] EDI |
| | | | LEDIVLTLTLFEDREMIEERLKTYAHLFDDKVMKQLKRRRYTGWGRLSRKLIN [symbol] DK |
| | | | QSGKTILDFLKSDGFANRNFMQLIHDDSLTFKEDIQKAQVSGQGDSLHEHIANL [symbol] SP |
| | | | AIKKGILQTVKVVDELVKVMGRHKPENIVIEMARENQTTQKGQKNSRERMKR [symbol] GI |
| | | | KELGSQILKEHPVENTQLQNEKLYLYYLQNGRDMYVDQELDINRLSDYDVDHIV [symbol] QS |
| | | | FLKDDSIDNKVLTRSDKNRGKSDNVPSEEVVKKMKNYWRQLLNAKLITQRKF [symbol] LT |
| | | | KAERGGLSELDKAGFIKRQLVETRQITKHVAQILDSRMNTKYDENDKLIREVKVITLK |
| | | | SKLVSDFRKDFQFYKVREINNYHHAHDAYLNAVVGTALIKKYPKLESEFVYGDYKV |
| | | | YDVRKMIAKSEQEIGKATAKYFFYSNIMNFFKTEITLANGEIRKRPLIETNGETGEIVW |
| | | | DKGRDFATVRKVLSMPQVNIVKKTEVQTGGFSKESILPKRNSDKLIARKKDWDPKKY |
| | | | GGFDSPTVAYSVLVVAKVEKGKSKKLKSVKELLGITIMERSSFEKNPIDFLEAKGYKE |
| | | | VKKDLIIKLPKYSLFELENGRKRMLASAGELQKGNELALPSKYVNFLYLASHYEKLK |
| | | | GSPEDNEQKQLFVEQHKHYLDEIIEQISEFSKRVILADANLDKVLSAYNKHRDKPIREQ |
| | | | AENIIHLFTLTNLGAPAAFKYFDTTIDRKRYTSTKEVLDATLIHQSITGLYETRIDLSQL |
| | | | GGDEGADKRTADGSEFESPKKKRKV |
| BE4 | pMRNA-BE4 120A | 443 | MSSETGPVAVDPTLRRRIEPHEFEVFFDPRELRKETCLLYEINWGGRHSIWRHTSQNTN |
| | BbsI | | KHVEVNFIEKFTTERYFCPNTRCSITWFLSWSPCGECSRAITEFLSRYPHVTLFIYIARL |
| | | | YHHADPRNRQGLRDLISSGVTIQIMTEQESGYCWRNFVNYSPSNEAHWPRYPHLWVR |
| | | | LYVLELYCIILGLPPCLNILRRKQPQLTFFTIALQSCHYQRLPPHILWATGLKSGGSSGG |
| | | | SSGSETPGTSESATPESSGGSSGGSDKKYSIGLAIGTNSVGWAVITDEYKVPSKK [symbol] KVL |
| | | | GNTDRHSIKKNLIGALLFDSGETAEATRLKRTARRRYTRRKNRICYLQEIFSNE [symbol] KV |
| | | | DDSFFHRLEESFLVEEDKKHERHPIFGNIVDEVAYHEKYPTIYHLRKKLVDSTD [symbol] ADL |
| | | | RLIYLALAHMIKFRGHFLIEGDLNPDNSDVDKLFIQLVQTYNQLFEENPINASGVDAK |
| | | | AILSARLSKSRRLENLIAQLPGEKKNGLFGNLIALSLGLTPNFKSNFDLAEDAKL [symbol] SK |
| | | | DTYDDDLDNLLAQIGDQYADLFLAAKNLSDAILLSDILRVNTEITKAPLSASMI [symbol] YD |
| | | | EHHQDLTLLKALVRQQLPEKYKEIFFDQSKNGYAGYIDGGASQEEFYKFIKPIL [symbol] D |
| | | | GTEELLVKLNREDLLRKQRTFDNGSIPHQIHLGELHAILRRQEDFYPFLKDNRE [symbol] KIL |
| | | | TFRIPYYVGPLARGNSRFAWMTRKSEETITPWNFEEVVDKGASAQSFIERMTN [symbol] NL |
| | | | PNEKVLPKHSLLYEYFTVYNELTKVKYVTEGMRKPAFLSGEQKKAIVDLLFKTNRKV |
| | | | TVKQLKEDYFKKIECFDSVEISGVEDRFNASLGTYHDLLKIIKDKDFLDNEENEDILEDI |
| | | | VLTLTLFEDREMIEERLKTYAHLFDDKVMKQLKRRRYTGWGRLSRKLINGIRDKQSG |
| | | | KTILDFLKSDGFANRNFMQLIHDDSLTFKEDIQKAQVSGQGDSLHEHIANLAGSPAIKK |
| | | | GILQTVKVVDELVKVMGRHKPENIVIEMARENQTTQKGQKNSRERMKRIEEGIKELG |
| | | | SQILKEHPVENTQLQNEKLYLYYLQNGRDMYVDQELDINRLSDYDVDHIVPQSFLKD |
| | | | DSIDNKVLTRSDKNRGKSDNVPSEEVVKKMKNYWRQLLNAKLITQRKFDNLTKAER |
| | | | GGLSELDKAGFIKRQLVETRQITKHVAQILDSRMNTKYDENDKLIREVKVITLKSKLV |
| | | | SDFRKDFQFYKVREINNYHHAHDAYLNAVVGTALIKKYPKLESEFVYGDYKVYDVR |
| | | | KMIAKSEQEIGKATAKYFFYSNIMNFFKTEITLANGEIRKRPLIETNGETGEIVWDKGR |
| | | | DFATVRKVLSMPQVNIVKKTEVQTGGFSKESILPKRNSDKLIARKKDWDPKKYGGFD |
| | | | SPTVAYSVLVVAKVEKGKSKKLKSVKELLGITIMERSSFEKNPIDFLEAKGYKEVKKD |
| | | | LIIKLPKYSLFELENGRKRMLASAGELQKGNELALPSKYVNFLYLASHYEKLKGSPED |
| | | | NEQKQLFVEQHKHYLDEIIEQISEFSKRVILADANLDKVLSAYNKHRDKPIREQ [symbol] ENII |
| | | | HLFTLTNLGAPAAFKYFDTTIDRKRYTSTKEVLDATLIHQSITGLYETRIDLSQL [symbol] DS |
| | | | GGSGGSGGSTNLSDIIEKETGKQLVIQESILMLPEEVEEVIGNKPESDILVHTAY [symbol] TD |
| | | | ENVMLLTSDAPEYKPWALVIQDSNGENKIKMLSGGSGGSGGSTNLSDIIEKETG [symbol] LV |
| | | | IQESILMLPEEVEEVIGNKPESDILVHTAYDESTDENVMLLTSDAPEYKPWALV [symbol] SN |
| | | | GENKIKMLSGGSKRTADGSEFESPKKKRKVE |
| ABE8.8- | pMRNA-trilink- | 444 | MSEVEFSHEYWMRHALTLAKRARDEREVPVGAVLVLNNRVIGEGWNRAIGL [symbol] TA |
| VRQR | monoTadA- | | SHAEIMALRQGGLVMQNYRLIDATLYVTFEPCVMCAGAMIHSRIGRVVFGVRN [symbol] G |
| | ABE8.8(TadA7.10 + | | AAGSLMDVLHHPGMNHRVEITEGILADECAALLCRFFRMPRRVFNAQKKAQS [symbol] SG |
| | H123H + Y147R + | | GSSGGSSGSETPGTSESATPESSGGSSGGSDKKYSIGLAIGTNSVGWAVITDEYKVPSK |
| | Q154R)- | | KFKVLGNTDRHSIKKNLIGALLFDSGETAEATRLKRTARRRYTRRKNRICYLQEIFSNE |
| | VRQR 120A bbsI | | MAKVDDSFFHRLEESFLVEEDKKHERHPIFGNIVDEVAYHEKYPTIYHLRKKLVDSTD |
| | | | KADLRLIYLALAHMIKFRGHFLIEGDLNPDNSDVDKLFIQLVQTYNQLFEENPINASGV |
| | | | DAKAILSARLSKSRRLENLIAQLPGEKKNGLFGNLIALSLGLTPNFKSNFDLAEDAKLQ |
| | | | LSKDTYDDDLDNLLAQIGDQYADLFLAAKNLSDAILLSDILRVNTEITKAPLSASMIKR |
| | | | YDEHHQDLTLLKALVRQQLPEKYKEIFFDQSKNGYAGYIDGGASQEEFYKFIKPILEK |
| | | | MDGTEELLVKLNREDLLRKQRTFDNGSIPHQIHLGELHAILRRQEDFYPFLKDNREKIE |
| | | | KILTFRIPYYVGPLARGNSRFAWMTRKSEETITPWNFEEVVDKGASAQSFIERMTNFD |
| | | | KNLPNEKVLPKHSLLYEYFTVYNELTKVKYVTEGMRKPAFLSGEQKKAIVDLLFKTN |
| | | | RKVTVKQLKEDYFKKIECFDSVEISGVEDRFNASLGTYHDLLKIIKDKDFLDNEENEDI |
| | | | LEDIVLTLTLFEDREMIEERLKTYAHLFDDKVMKQLKRRRYTGWGRLSRKLINGIRDK |
| | | | QSGKTILDFLKSDGFANRNFMQLIHDDSLTFKEDIQKAQVSGQGDSLHEHIANLAGSP |
| | | | AIKKGILQTVKVVDELVKVMGRHKPENIVIEMARENQTTQKGQKNSRERMKR [symbol] EGI |
| | | | KELGSQILKEHPVENTQLQNEKLYLYYLQNGRDMYVDQELDINRLSDYDVDH [symbol] QS |
| | | | FLKDDSIDNKVLTRSDKNRGKSDNVPSEEVVKKMKNYWRQLLNAKLITQRKF [symbol] LT |
| | | | KAERGGLSELDKAGFIKRQLVETRQITKHVAQILDSRMNTKYDENDKLIREVK [symbol] LK |
| | | | SKLVSDFRKDFQFYKVREINNYHHAHDAYLNAVVGTALIKKYPKLESEFVYG [symbol] V |
| | | | YDVRKMIAKSEQEIGKATAKYFFYSNIMNFFKTEITLANGEIRKRPLIETNGETG [symbol] W |
| | | | DKGRDFATVRKVLSMPQVNIVKKTEVQTGGFSKESILPKRNSDKLIARKKDWD [symbol] KY |
| | | | GGFVSPTVAYSVLVVAKVEKGKSKKLKSVKELLGITIMERSSFEKNPIDFLEAK [symbol] KE |
| | | | VKKDLIIKLPKYSLFELENGRKRMLASARELQKGNELALPSKYVNFLYLASHY [symbol] KG |
| | | | SPEDNEQKQLFVEQHKHYLDEIIEQISEFSKRVILADANLDKVLSAYNKHRDKPIREQA |
| | | | ENIIHILFTLTNLGAPAAFKYFDTTIDRKQYRSTKEVLDATLIHQSITGLYETRIDLSQLG |
| | | | GDEGADKRTADGSEFESPKKKRKV |
| BE4- | pMRNA-BE4-VRQR | 445 | MSSETGPVAVDPTLRRRIEPHEFEVFFDPRELRKETCLLYEINWGGRHSIWRHTSQNTN |
| VRQR | 120A BsaI | | KHVEVNFIEKFTTERYFCPNTRCSITWFLSWSPCGECSRAITEFLSRYPHVTLFIYIARL |
| | | | YHHADPRNRQGLRDLISSGVTIQIMTEQESGYCWRNFVNYSPSNEAHWPRYPHLWVR |
| | | | LYVLELYCIILGLPPCLNILRRKQPQLTFFTIALQSCHYQRLPPHILWATGLKSGGSSGG |
| | | | SSGSETPGTSESATPESSGGSSGGSDKKYSIGLAIGTNSVGWAVITDEYKVPSKKFKVL |
| | | | GNTDRHSIKKNLIGALLFDSGETAEATRLKRTARRRYTRRKNRICYLQEIFSNEMAKV |
| | | | DDSFFHRLEESFLVEEDKKHERHPIFGNIVDEVAYHEKYPTIYHLRKKLVDSTDKADL |
| | | | RLIYLALAHMIKFRGHFLIEGDLNPDNSDVDKLFIQLVQTYNQLFEENPINASGVDAK |
| | | | AILSARLSKSRRLENLIAQLPGEKKNGLFGNLIALSLGLTPNFKSNFDLAEDAKLQLSK |
| | | | DTYDDDLDNLLAQIGDQYADLFLAAKNLSDAILLSDILRVNTEITKAPLSASMIKRYD |
| | | | EHHQDLTLLKALVRQQLPEKYKEIFFDQSKNGYAGYIDGGASQEEFYKFIKPIL [symbol] KMD |
| | | | GTEELLVKLNREDLLRKQRTFDNGSIPHQIHLGELHAILRRQEDFYPFLKDNRE [symbol] KIL |
| | | | TFRIPYYVGPLARGNSRFAWMTRKSEETITPWNFEEVVDKGASAQSFIERMTN [symbol] NL |
| | | | PNEKVLPKHSLLYEYFTVYNELTKVKYVTEGMRKPAFLSGEQKKAIVDLLFKT [symbol] KV |
| | | | TVKQLKEDYFKKIECFDSVEISGVEDRFNASLGTYHDLLKIIKDKDFLDNEENE [symbol] EDI |
| | | | VLTLTLFEDREMIEERLKTYAHLFDDKVMKQLKRRRYTGWGRLSRKLINGIRD [symbol] SG |
| | | | KTILDFLKSDGFANRNFMQLIHDDSLTFKEDIQKAQVSGQGDSLHEHIANLAGS [symbol] KK |
| | | | GILQTVKVVDELVKVMGRHKPENIVIEMARENQTTQKGQKNSRERMKRIEEGI [symbol] G |
| | | | SQILKEHPVENTQLQNEKLYLYYLQNGRDMYVDQELDINRLSDYDVDHIVPQS [symbol] D |
| | | | DSIDNKVLTRSDKNRGKSDNVPSEEVVKKMKNYWRQLLNAKLITQRKFDNLTKAER |
| | | | GGLSELDKAGFIKRQLVETRQITKHVAQILDSRMNTKYDENDKLIREVKVITLKSKLV |
| | | | SDFRKDFQFYKVREINNYHHAHDAYLNAVVGTALIKKYPKLESEFVYGDYKVYDVR |
| | | | KMIAKSEQEIGKATAKYFFYSNIMNFFKTEITLANGEIRKRPLIETNGETGEIVWDKGR |
| | | | DFATVRKVLSMPQVNIVKKTEVQTGGFSKESILPKRNSDKLIARKKDWDPKKYGGFV |
| | | | SPTVAYSVLVVAKVEKGKSKKLKSVKELLGITIMERSSFEKNPIDFLEAKGYKEVKKD |
| | | | LIIKLPKYSLFELENGRKRMLASARELQKGNELALPSKYVNFLYLASHYEKLKGSPED |
| | | | NEQKQLFVEQHKHYLDEIIEQISEFSKRVILADANLDKVLSAYNKHRDKPIREQAENII |
| | | | HLFTLTNLGAPAAFKYFDTTIDRKQYRSTKEVLDATLIHQSITGLYETRIDLSQLGGDS |
| | | | GGSGGSGGSTNLSDIIEKETGKQLVIQESILMLPEEVEEVIGNKPESDILVHTAYDESTD |
| | | | ENVMLLTSDAPEYKPWALVIQDSNGENKIKMLSGGSGGSGGSTNLSDIIEKETGKQLV |
| | | | IQESILMLPEEVEEVIGNKPESDILVHTAYDESTDENVMLLTSDAPEYKPWALVIQDSN |
| | | | GENKIKMLSGGSKRTADGSEFESPKKKRKVE |
| saABE8.8 | pMRNA-trilink- | 446 | MSEVEFSHEYWMRHALTLAKRARDEREVPVGAVLVLNNRVIGEGWNRAIGL [symbol] PTA |
| | monoTadA-saABE8.8 | | HAEIMALRQGGLVMQNYRLIDATLYVTFEPCVMCAGAMIHSRIGRVVFGVRN [symbol] TG |
| | (TadA7.10 + H123H + | | AAGSLMDVLHHPGMNHRVEITEGILADECAALLCRFFRMPRRVFNAQKKAQS [symbol] SG |
| | Y147R + Q154R) 120A | | GSSGGSSGSETPGTSESATPESSGGSSGGSKRNYILGLAIGITSVGYGIIDYETRD [symbol] AG |
| | bbsI | | VRLFKEANVENNEGRRSKRGARRLKRRRRHRIQRVKKLLFDYNLLTDHSELS [symbol] YE |
| | | | ARVKGLSQKLSEEEFSAALLHLAKRRGVHNVNEVEEDTGNELSTKEQISRNSK [symbol] EK |
| | | | YVAELQLERLKKDGEVRGSINRFKTSDYVKEAKQLLKVQKAYHOLDQSFIDT [symbol] L |
| | | | ETRRTYYEGPGEGSPFGWKDIKEWYEMLMGHCTYFPEELRSVKYAYNADLY [symbol] ND |
| | | | LNNLVITRDENEKLEYYEKFQIIENVFKQKKKPTLKQIAKEILVNEEDIKGYRVT [symbol] GK |
| | | | PEFTNLKVYHDIKDITARKEIIENAELLDQIAKILTIYQSSEDIQEELTNLNSELTQEEIEQ |
| | | | ISNLKGYTGTHNLSLKAINLILDELWHTNDNQIAIFNRLKLVPKKVDLSQQKEIPTTLV |
| | | | DDFILSPVVKRSFIQSIKVINAIIKKYGLPNDIIIELAREKNSKDAQKMINEMQKRNRQT |
| | | | NERIEEIIRTTGKENAKYLIEKIKLHDMQEGKCLYSLEAIPLEDLLNNPFNYEVDHIIPRS |
| | | | VSFDNSFNNKVLVKQEENSKKGNRTPFQYLSSSDSKISYETFKKHILNLAKGKGRISKT |
| | | | KKEYLLEERDINRFSVQKDFINRNLVDTRYATRGLMNLLRSYFRVNNLDVKVKSING |
| | | | GFTSFLRRKWKFKKERNKGYKHHAEDALIIANADFIFKEWKKLDKAKKVMENQMFE |
| | | | EKQAESMPEIETEQEYKEIFITPHQIKHIKDFKDYKYSHRVDKKPNRELINDTLYSTRK |
| | | | DDKGNTLIVNNLNGLYDKDNDKLKKLINKSPEKLLMYHHDPQTYQKLKLIMEQYGD |
| | | | EKNPLYKYYEETGNYLTKYSKKDNGPVIKKIKYYGNKLNAHLDITDDYPNSRNKVVK |
| | | | LSLKPYRFDVYLDNGVYKFVTVKNLDVIKKENYYEVNSKCYEEAKKLKKISNQAEFI |
| | | | ASFYNNDLIKINGELYRVIGVNNDLLNRIEVNMIDITYREYLENMNDKRPPRIIKTIASK |
| | | | TQSIKKYSTDILGNLYEVKSKKHPQIIKKGEGADKRTADGSEFESPKKKRKV |
| saBE4 | pMRNA-saBE4 120A | 447 | MSSETGPVAVDPTLRRRIEPHEFEVFFDPRELRKETCLLYEINWGGRHSIWRHT [symbol] QNTN |
| | BbsI | | KHVEVNFIEKFTTERYFCPNTRCSITWFLSWSPCGECSRAITEFLSRYPHVTLFIY [symbol] L |
| | | | YHHADPRNRQGLRDLISSGVTIQIMTEQESGYCWRNFVNYSPSNEAHWPRYPH [symbol] VR |
| | | | LYVLELYCIILGLPPCLNILRRKQPQLTFFTIALQSCHYQRLPPHILWATGLKSG [symbol] GG |
| | | | SSGSETPGTSESATPESSGGSSGGSGKRNYILGLAIGITSVGYGIIDYETRDVIDA [symbol] LF |
| | | | KEANVENNEGRRSKRGARRLKRRRRHRIQRVKKLLFDYNLLTDHSELSGINPY [symbol] RV |
| | | | KGLSQKLSEEEFSAALLHLAKRRGVHNVNEVEEDTGNELSTKEQISRNSKALE [symbol] V |
| | | | AELQLERLKKDGEVRGSINRFKTSDYVKEAKQLLKVQKAYHQLDQSFIDTYID [symbol] TR |
| | | | RTYYEGPGEGSPFGWKDIKEWYEMLMGHCTYFPEELRSVKYAYNADLYNAL [symbol] N |
| | | | NLVITRDENEKLEYYEKFQIIENVFKQKKKPTLKQIAKEILVNEEDIKGYRVTSTGKPEF |
| | | | TNLKVYHDIKDITARKEIIENAELLDQIAKILTIYQSSEDIQEELTNLNSELTQEEIEQISN |
| | | | LKGYTGTHNLSLKAINLILDELWHTNDNQIAIFNRLKLVPKKVDLSQQKEIPTTLVDDF |
| | | | ILSPVVKRSFIQSIKVINAIIKKYGLPNDIIIELAREKNSKDAQKMINEMQKRNRQTNERI |
| | | | EEIIRTTGKENAKYLIEKIKLHDMQEGKCLYSLEAIPLEDLLNNPFNYEVDHIIPRSVSF |
| | | | DNSFNNKVLVKQEENSKKGNRTPFQYLSSSDSKISYETFKKHILNLAKGKGRISKTKK |
| | | | EYLLEERDINRFSVQKDFINRNLVDTRYATRGLMNLLRSYFRVNNLDVKVKSINGGFT |
| | | | SFLRRKWKFKKERNKGYKHHAEDALIIANADFIFKEWKKLDKAKKVMENQMFEEKQ |
| | | | AESMPEIETEQEYKEIFITPHQIKHIKDFKDYKYSHRVDKKPNRELINDTLYSTRKDDK |
| | | | GNTLIVNNLNGLYDKDNDKLKKLINKSPEKLLMYHHDPQTYQKLKLIMEQYGDEKN |
| | | | PLYKYYEETGNYLTKYSKKDNGPVIKKIKYYGNKLNAHLDITDDYPNSRNKVVKLSL |
| | | | KPYRFDVYLDNGVYKFVTVKNLDVIKKENYYEVNSKCYEEAKKLKKISNQAEFIASF |
| | | | YNNDLIKINGELYRVIGVNNDLLNRIEVNMIDITYREYLENMNDKRPPRIIKTIASKTQS |
| | | | IKKYSTDILGNLYEVKSKKHPQIIKKGGSPKKKRKVSSDYKDHDGDYKDHDID [symbol] KDD |
| | | | DDKSGGSGGSGGSTNLSDIIEKETGKQLVIQESILMLPEEVEEVIGNKPESDILV [symbol] YD |
| | | | ESTDENVMLLTSDAPEYKPWALVIQDSNGENKIKMLSGGSGGSGGSTNLSDIIE [symbol] TG |
| | | | KQLVIQESILMLPEEVEEVIGNKPESDILVHTAYDESTDENVMLLTSDAPEYKP [symbol] VI |
| | | | QDSNGENKIKMLSGGSKRTADGSEFESPKKKRKVE |
| saBE4- | pMRNA-saBE4-KKH | 448 | MSSETGPVAVDPTLRRRIEPHEFEVFFDPRELRKETCLLYEINWGGRHSIWRHT [symbol] TN |
| KKH | 120A BbsI | | KHVEVNFIEKFTTERYFCPNTRCSITWFLSWSPCGECSRAITEFLSRYPHVTLFIY [symbol] L |
| | | | YHHADPRNRQGLRDLISSGVTIQIMTEQESGYCWRNFVNYSPSNEAHWPRYPH [symbol] VR |
| | | | LYVLELYCIILGLPPCLNILRRKQPQLTFFTIALQSCHYQRLPPHILWATGLKSGG [symbol] GG |
| | | | SSGSETPGTSESATPESSGGSSGGSGKRNYILGLAIGITSVGYGIIDYETRDVIDAGVRLF |
| | | | KEANVENNEGRRSKRGARRLKRRRRHRIQRVKKLLFDYNLLTDHSELSGINPYEARV |
| | | | KGLSQKLSEEEFSAALLHLAKRRGVHNVNEVEEDTGNELSTKEQISRNSKALEEKYV |
| | | | AELQLERLKKDGEVRGSINRFKTSDYVKEAKQLLKVQKAYHQLDQSFIDTYIDLLETR |
| | | | RTYYEGPGEGSPFGWKDIKEWYEMLMGHCTYFPEELRSVKYAYNADLYNALNDLN |
| | | | NLVITRDENEKLEYYEKFQIIENVFKQKKKPTLKQIAKEILVNEEDIKGYRVTSTGKPEF |
| | | | TNLKVYHDIKDITARKEIIENAELLDQIAKILTIYQSSEDIQEELTNLNSELTQEEIEQISN |
| | | | LKGYTGTHNLSLKAINLILDELWHTNDNQIAIFNRLKLVPKKVDLSQQKEIPTTLVDDF |
| | | | ILSPVVKRSFIQSIKVINAIIKKYGLPNDIIIELAREKNSKDAQKMINEMQKRNRQTNERI |
| | | | EEIIRTTGKENAKYLIEKIKLHDMQEGKCLYSLEAIPLEDLLNNPFNYEVDHIIPRSVSF |
| | | | DNSFNNKVLVKQEENSKKGNRTPFQYLSSSDSKISYETFKKHILNLAKGKGRISKTKK |
| | | | EYLLEERDINRFSVQKDFINRNLVDTRYATRGLMNLLRSYFRVNNLDVKVKSINGGFT |
| | | | SFLRRKWKFKKERNKGYKHHAEDALIIANADFIFKEWKKLDKAKKVMENQMFEEKQ |
| | | | AESMPEIETEQEYKEIFITPHQIKHIKDFKDYKYSHRVDKKPNRKLINDTLYSTR [symbol] DDK |
| | | | GNTLIVNNLNGLYDKDNDKLKKLINKSPEKLLMYHHDPQTYQKLKLIMEQYG [symbol] KN |
| | | | PLYKYYEETGNYLTKYSKKDNGPVIKKIKYYGNKLNAHLDITDDYPNSRNKV [symbol] SL |
| | | | KPYRFDVYLDNGVYKFVTVKNLDVIKKENYYEVNSKCYEEAKKLKKISNQAE [symbol] SF |
| | | | YKNDLIKINGELYRVIGVNNDLLNRIEVNMIDITYREYLENMNDKRPPHIIKTIA [symbol] QS |
| | | | IKKYSTDILGNLYEVKSKKHPQIIKKGGSPKKKRKVSSDYKDHDGDYKDHDID [symbol] D |
| | | | DDKSGGSGGSGGSTNLSDIIEKETGKQLVIQESILMLPEEVEEVIGNKPESDILVH [symbol] YD |
| | | | ESTDENVMLLTSDAPEYKPWALVIQDSNGENKIKMLSGGSGGSGGSTNLSDIIE [symbol] G |
| | | | KQLVIQESILMLPEEVEEVIGNKPESDILVHTAYDESTDENVMLLTSDAPEYKPWALVI |
| | | | QDSNGENKIKMLSGGSKRTADGSEFESPKKKRKVE |
| ABE- | pBZ517 | 449 | MSEVEFSHEYWMRHALTLAKRARDEREVPVGAVLVLNNRVIGEGWNRAIGLHDPTA |
| bhCas12b | pCV021_ABE8.13m- | | HAEIMALRQGGLVMQNYRLYDATLYVTFEPCVMCAGAMIHSRIGRVVFGVRNAKTG |
| | dBhCas12b_(D952A,_ | | AAGSLMDVLHHPGMNHRVEITEGILADECAALLCRFFRMPRRVFNAQKKAQSSTDGS |
| | S893R,_K846R,_E837G) | | SGSETPGTSESATPESSGAPKKKRKVGIHGVPAAATRSFILKIEPNEEVKKGLWKTHEV |
| | | | LNHGIAYYMNILKLIRQEAIYEHHEQDPKNPKKVSKAEIQAELWDFVLKMQKCNSFT |
| | | | HEVDKDEVFNILRELYEELVPSSVEKKGEANQLSNKFLYPLVDPNSQSGKGTASSGRK |
| | | | PRWYNIKIAGDPSWEEEKKKWEEDKKKDPLAKILGKLAEYGLIPLFIPYTDSNEPIVK |
| | | | EIKWMEKSRNQSVRRLDKDMFIQALERFLSWESWNLKVKEEYEKVEKEYKTLEERIK |
| | | | EDIQALKALEQYEKERQEQLLRDTLNTNEYRLSKRGLRGWREIIQKWLKMDENEPSE |
| | | | KYLEVFKDYQRKHPREAGDYSVYEFLSKKENHFIWRNHPEYPYLYATFCEIDKKKKD |
| | | | AKQQATFTLADPINHPLWVRFEERSGSNLNKYRILTEQLHTEKLKKKLTVQLDRLIYP |
| | | | TESGGWEEKGKVDIVLLPSRQFYNQIFLDIEEKGKHAFTYKDESIKFPLKGTLG [symbol] ARV |
| | | | QFDRDHLRRYPHKVESGNVGRIYFNMTVNIEPTESPVSKSLKIHRDDFPKVVNF [symbol] KE |
| | | | LTEWIKDSKGKKLKSGIESLEIGLRVMSIALGQRQAAAASIFEVVDQKPDIEGK [symbol] PIK |
| | | | GTELYAVHRASFNIKLPGETLVKSREVLRKAREDNLKLMNQKLNFLRNVLHF [symbol] ED |
| | | | ITEREKRVTKWISRQENSDVPLVYQDELIQIRELMYKPYKDWVAFLKQLHKRL [symbol] IG |
| | | | KEVKHWRKSLSDGRKGLYGISLKNIDEIDRTRKFLLRWSLRPTEPGEVRRLEPG [symbol] FAI |
| | | | DQLNHLNALKEDRLKKMANTIIMHALGYCYDVRKKKWQAKNPACQIILFEDL [symbol] YN |
| | | | PYKERSRFENSRLMKWSRREIPRQVALQGEIYGLQVGEVGAQFSSRFHAKTGS [symbol] RC |
| | | | RVVTKEKLQDNRFFKNLQREGRLTLDKIAVLKEGDLYPDKGGEKFISLSKDRK [symbol] T |
| | | | HADINAAQNLQKRFWTRTHGFYKVYCKAYQVDGQTVYIPESKDQKQKIIEEFGEGYF |
| | | | ILKDGVYEWVNAGKLKIKKGSSKQSSSELVDSDILKDSFDLASELKGEKLMLYRDPSG |
| | | | NVFPSDKWMAAGVFFGKLERILISKLTNQYSISTIEDDSSKQSMKRPAATKKAGQAKK |
| | | | KK |
| bhCas12b | Cas12b v4 | 450 | MAPKKKRKVGIHGVPAAATRSFILKIEPNEEVKKGLWKTHEVLNHGIAYYMNILKLIR |
| v4 | | | QEAIYEHHEQDPKNPKKVSKAEIQAELWDFVLKMQKCNSFTHEVDKDEVENILRELY |
| | | | EELVPSSVEKKGEANQLSNKFLYPLVDPNSQSGKGTASSGRKPRWYNIKIAGDPSWE |
| | | | EEKKKWEEDKKKDPLAKILGKLAEYGLIPLFIPYTDSNEPIVKEIKWMEKSRNQSVRR |
| | | | LDKDMFIQALERFLSWESWNLKVKEEYEKVEKEYKTLEERIKEDIQALKALEQYEKE |
| | | | RQEQLLRDTLNTNEYRLSKRGLRGWREIIQKWLKMDENEPSEKYLEVFKDYQRKHPR |
| | | | EAGDYSVYEFLSKKENHFIWRNHPEYPYLYATFCEIDKKKKDAKQQATFTLADPINHP |
| | | | LWVRFEERSGSNLNKYRILTEQLHTEKLKKKLTVQLDRLIYPTESGGWEEKGKVDIVL |
| | | | LPSRQFYNQIFLDIEEKGKHAFTYKDESIKFPLKGTLGGARVQFDRDHLRRYPHKVES |
| | | | GNVGRIYFNMTVNIEPTESPVSKSLKIHRDDFPKVVNFKPKELTEWIKDSKGKK [symbol] KSGI |
| | | | ESLEIGLRVMSIDLGQRQAAAASIFEVVDQKPDIEGKLFFPIKGTELYAVHRASF [symbol] LP |
| | | | GETLVKSREVLRKAREDNLKLMNQKLNFLRNVLHFQQFEDITEREKRVTKWIS [symbol] EN |
| | | | SDVPLVYQDELIQIRELMYKPYKDWVAFLKQLHKRLEVEIGKEVKHWRKSLS [symbol] K |
| | | | GLYGISLKNIDEIDRTRKFLLRWSLRPTEPGEVRRLEPGQRFAIDQLNHLNALK [symbol] LK |
| | | | KMANTIIMHALGYCYDVRKKKWQAKNPACQIILFEDLSNYNPYGERSRFENSR [symbol] K |
| | | | WSRREIPRQVALQGEIYGLQVGEVGAQFSSRFHAKTGSPGIRCRVVTKEKLQD [symbol] FK |
| | | | NLQREGRLTLDKIAVLKEGDLYPDKGGEKFISLSKDRKCVTTHADINAAQNLQ [symbol] W |
| | | | TRTHGFYKVYCKAYQVDGQTVYIPESKDQKQKIIEEFGEGYFILKDGVYEWVN [symbol] KL |
| | | | KIKKGSSKQSSSELVDSDILKDSFDLASELKGEKLMLYRDPSGNVFPSDKWMAAGVFF |
| | | | GKLERILISKLTNQYSISTIEDDSSKQSMSGGSKRTADGSEFESPKKKRKVE |

[symbol]

indicates data missing or illegible when filed

### Example 2. Confirmation of Loss of Transthyretin (TTR) Expression in Hepatocytes

[0908] The guide RNAs identified in Example 1 as working well in splice site disruption using ABE and/or BE4, or as working well with bhCas12b are used to edit transthyretin (TTR) in hepatocytes to result in loss or reduction in TTR expression. Standard methods for culturing hepatocytes are used (see, e.g., Shulman and Nahmias, “Long-term and coculture of primary rate and human hepatocytes”, Methods Mol. Biol., 945:287-302 (2013); and Castell J., Gómez-Lechón M. (2009) Liver Cell Culture Techniques. In: Dhawan A., Hughes R. (eds) Hepatocyte Transplantation. Methods in Molecular Biology, vol 481. Humana Press, Totowa, NJ. https://doi.org/10.1007/978-1-59745-201-4_4). For gene editing, the base editors and bhCas12b are delivered to the cells as mRNA in combination with sgRNA using lipid nanoparticles. Following gene editing, transthyretin (TTR) expression in the cells is confirmed as reduced or eliminated. Reduction or elimination of expression is confirmed using standard techniques in molecular biology (e.g., Real-Time Quantitative Reverse Transcription PCR).

### Example 3. Direct Correction of the Transthyretin (TTR) V122I Mutation

[0909] The mutation V122I in the mature transthyretin (TTR) polypeptide is the African American population founder mutation. The mutation is a major cause of cardiovascular mortality (i.e., cardiac amyloidosis) for the African American population. About 3.9% of African Americans have the V122I mutation. The V122I mutation can be edited using ABE. Thus, ABE is used to directly correct the V122I mutation in cells.

[0910] ABE mRNA and sgRNA are delivered to a cell (e.g., a hepatocyte or a HEK293T cell) encoding a transthyretin (TTR) polypeptide having the V122I mutation. ABE mRNA encoding the base editors indicated in Table 21 below are administered in combination with sgRNAs comprising the indicated spacer sequences. The transthyretin (TTR) gene in the cell is successfully edited to no longer encode the pathogenic V122I mutation and to encode a non-pathogenic version of transthyretin (e.g., transthyretin with a valine at position 122).

TABLE 21
Base editor and nuclease sequences.
One of skill in the art will understand that
some of the target site sequences correspond
to a reverse-complement to the above-provided
transthyretin polynucleotide sequence;
i.e., the target sequences may correspond to
either strand of a dsDNA molecule encoding
a transthyretin polynucleotide.

| Base | | Spacer | | Target | Target |
|---|---|---|---|---|---|
| Editor | sgRNA | Sequence | PAM | Sequence | Base |
| spCas9- | sgRNA_ | GGCUAUCGUC | AGG | GGCTATCGTC | 5A |
| ABE | 375 | ACCAAUCCCA | | ACCAATCCCA | |
| | | (SEQ ID | | (SEQ ID | |
| | | NO: 375) | | NO: 439) | |
| spCas9- | sgRNA_ | GCUAUCGUCA | GGA | GCTATCGTCA | 4A |
| VRQR- | 376 | CCAAUCCCAA | | CCAATCCCAA | |
| ABE | | (SEQ ID | | (SEQ ID | |
| | | NO: 376) | | NO: 440) | |
| saCas9- | sgRNA_ | GGCUAUCGUC | AGG | GGCTATCGTC | 5A |
| ABE | 377 | ACCAAUCCCA | AAT | ACCAATCCCA | |
| | | (SEQ ID | | (SEQ ID | |
| | | NO: 377) | | NO: 441) | |

[0911] In embodiments, the altered amino acid is in a splice site or start codon as illustrated in the following sequences. Alterations in splice site disrupt expression of the encoded TTR polypeptide. A description of the respective target for each of the following sequences is indicated in parentheses:
[0912] 4A of the nucleotide sequence TATAGGAAAACCAGTGAGTC (SEQ ID NO: 425); (splice sites)
[0913] 6A of the nucleotide sequence TACTCACCTCTGCATGCTCA (SEQ ID NO: 426); (splice sites)
[0914] 5A of the nucleotide sequence ACTCACCTCTGCATGCTCAT (SEQ ID NO: 427); (splice sites)
[0915] 7A of the nucleotide sequence ATACTCACCTCTGCATGCTCA (SEQ ID NO: 429); (splice sites)
[0916] 6A of the nucleotide sequence TTGGCAGGATGGCTTCTCATCG (SEQ ID NO: 431); (splice sites)
[0917] 9A of the sequence TTGGCAGGATGGCTTCTCATCG (SEQ ID NO: 431); (start codon)
[0918] 5A of the sequence GGCTATCGTCACCAATCCCA (SEQ ID NO: 439) (correction of pathogenic mutation); or
[0919] 4A of the sequence GCTATCGTCACCAATCCCAA (SEQ ID NO: 440) (correction of pathogenic mutation).
[0920] 7C of the nucleotide sequence TACTCACCTCTGCATGCTCA (SEQ ID NO: 426); (splice sites)
[0921] 6C of the nucleotide sequence ACTCACCTCTGCATGCTCAT (SEQ ID NO: 427); (splice sites)
[0922] 7C of the nucleotide sequence TACCACCTATGAGAGAAGAC (SEQ ID NO: 428); (splice sites)
[0923] 8C of the nucleotide sequence ATACTCACCTCTGCATGCTCA (SEQ ID NO: 429); or (splice sites)
[0924] 11C of the nucleotide sequence ACTGGTTTTCCTATAAGGTGT (SEQ ID NO: 430). (splice sites)

### Example 4. Transthyretin (TTR) Guide Screening and Functional Knockdown Assessment in Primary Hepatocytes

[0925] Experiments were undertaken to determine the efficacy of the base editor systems developed in the above Examples in editing human or primate primary hepatocytes. As described above, fifteen guide RNAs were designed to knockdown transthyretin (TTR) protein expression in HEK293T cells. These guides used either a base editing strategy for splice site disruption or a nuclease-based bhCas12b strategy. A base editing strategy was initially prioritized. Base editing guides were used with either an ABE (adenosine base editor) or CBE (cytidine base editor) for splice site disruption, and a subset of guides was suitable for use with both an ABE and a CBE. Six guide editor combinations exhibited good editing efficiency in HEK293T cells (FIG. 1): ABE8.8_sgRNA_361; ABE8.8_sgRNA_362; BE4_sgRNA_362; ABE8.8-VRQR_sgRNA_363; BE4-VRQR_sgRNA_363; and BE4-KKH_sgRNA_366. Experiments were undertaken to evaluate these four guides (sgRNAs 361, 362, 363, 366; sequences are listed in Table 1) in primary hepatocytes (both human and Macaca fascicularis) to assess editing efficiency in primary cells and the capacity for functional knockdown of TTR protein expression.

### Screening Hek293T-Validated TTR Knockdown Guides in PXIB-Cell Primary Human Hepatocytes

[0926] Editor mRNA_sgRNA combinations (i.e. base editor systems) were transfected in triplicate in human hepatocytes extracted from humanized mouse livers (PXB-cells, PhoenixBio) following a 3-day cell incubation. In addition to the 6 guide-editor pairs of interest (ABE8.8_sgRNA_361; ABE8.8_sgRNA_362; BE4_sgRNA_362; ABE8.8-VRQR_sgRNA_363; BE4-VRQR_sgRNA_363; and BE4-KKH_sgRNA_366), two positive control guide-editor pairs were also transfected. These positive controls included ABE8.8_sgRNA_088, which conained the spacer sequence CAGGAUCCGCACAGACUCCA (SEQ ID NO: 581) and is known to be effective at editing sites outside of the TTR gene, and Cas9_gRNA991 (Gillmore, J. D. et al. “CRISPR-Cas9 In Vivo Gene Editing for Transthyretin Amyloidosis,” New Engl J Med 385, 493-502 (2021)), which contained the spacer sequence AAAGGCUGCUGAUGACACCU (SEQ ID NO: 565) corresponding to the target sequence AAAGGCTGCTGATGACACCT (SEQ ID NO: 580). The guide gRNA991 is known to be effective for use in inducing functional TTR knockdown in hepatocytes. An untreated condition was also included as a negative control. To assess functional TTR knockdown, cell supernatants were collected and stored at −80° C. Collections were performed prior to transfection (3-day incubation), as well as 4-, 7-, 10-, and 13-days post-transfection. An additional media change was performed 1 day post-transfection, but the supernatant was discarded. Genomic DNA was harvested from cells 13 days post-transfection and editing efficiency was assessed by Next Generation Sequencing (NGS). A human TTR ELISA assay was used to assess TTR protein concentration in cell supernatants pre-transfection, as well as 7-days and 13-days post-transfection.

[0927] Pre-transfection, no significant difference in TTR concentration was observed between samples (FIG. 3). By 7-days post-transfection, a roughly 50% reduction in TTR levels was observed for ABE8.8_sgRNA_361 and ABE8.8_sgRNA_362 as compared to the control ABE8.8_sgRNA_088, which did not edit within the TTR gene (FIG. 4). This reduction was comparable to the positive control Cas9_gRNA991 (FIG. 4). Similar trends were observed 13-days post-transfection (FIG. 5). Editing efficiencies for ABE8.8_sgRNA_361 and ABE8.8_sgRNA_362 were both high, at approximately 60% (FIGS. 2 and 5). This was comparable to the controls ABE8.8_sgRNA_088 and Cas9_gRNA991 (FIGS. 4 and 5). TTR protein knockdown was positively correlated with editing rates across samples (FIGS. 4 and 5).

Assessing Editingperformance and Functional Knockdown Generation for ABE8.8 sgRNAA361 and ABE8.8 sgRNA362 in Primary Cyno Hepatocytes

[0928] ABE8.8_sgRNA_361 and ABE8.8_sgRNA_362, both of which exhibited high target base-editing and functional TTR protein knockdown in PXB-cells, were transfected in triplicate in primary cyno (Macaca fascicularis) hepatocyte co-cultures. ABE8.8_sgRNA_088 was transfected as a positive control, and an untreated condition was included as a negative control, both in triplicate. To assess functional TTR knockdown, cell supernatants were collected and stored at −80° C. Collections were performed prior to transfection (3-day incubation), as well as 4-, 7-, 10-, and 13-days post-transfection. An additional media change was performed 1 day post-transfection, but the supernatant was discarded. Genomic DNA was harvested from cells 13 days post-transfection and editing efficiency was assessed by Next Generation Sequencing (NGS). A modified TTR ELISA assay was used to assess cyno TTR protein concentration in cell supernatants pre-transfection, as well as 7-days and 13-days post-transfection.

[0929] Pre-transfection, no significant difference in cyno TTR concentration was observed between samples (FIG. 6). By 7-days post-transfection, roughly₆₀-7₀% reductions in cyno TTR levels were observed for ABE8.8_sgRNA_361 and ABE8.8_sgRNA_362 as compared to ABE8.8_sgRNA_088, which did not edit within the TTR gene (FIG. 7). Similar trends were observed 13-days post-transfection (FIG. 8). Editing efficiencies for ABE8.8_sgRNA_361 and ABE8.8_sgRNA_362 were both high, at approximately 70% (FIGS. 7 and 8). This was comparable to the ABE8.8_sgRNA_088 positive control (FIGS. 7 and 8).

[0930] The following materials and methods were employed in this Example.

### PXIB-Cell Maintenance

[0931] One 24-well plate of PXB-cell hepatocytes was ordered from PhoenixBio. After receipt of cells, media was changed twice with pre-warmed dHCGM media (PhoenixBio)+10% Fetal Bovine Serum (Thermo Fisher, A3160401). Cells were then incubated according to the manufacturer's instructions, changing the media every 3 days. An extra media change was performed the day following transfection, after which a 3-day media change schedule was resumed. For all media changes other than the two initial changes and the day following transfection (pre-transfection and 4, 7, 10, and 13 days post-transfection), media was collected, distributed across multiple 96-well plates, and stored at −80° C.

### Primary Cyno Hepatocyte (PCH) Co-Culture Generation and Maintenance

[0932] A frozen vial of primary cyno hepatocytes (IVAL, A75245, Lot #10286011) was thawed and mixed with 50 mL pre-warmed CHRM medium (Invitrogen, CM7000). Tube was centrifuged at 100×g for 10 minutes at room temperature. CHRM media was discarded and cell pellet was resuspended in 4 mL INVITROGRO CP Medium (Bio IVT, Z990003)+2.2% Torpedo Antibiotic Mix (Bio IVT, Z99000). Cells were counted using a Neubauer Improved hemocytometer (SKC, Inc., DHCN015) and 350,000 cells/well were plated in a 24-well BioCoat Rat Collagen I plate (Corning, 354408). There was a sufficient number of cells for 18 wells. Co-cultures were generated 5 hours after plating through the addition of 20,000 3T3-J2 cells (Stem Cell Technologies, 100-0353) in fresh CP+Torpedo media to each well. Following a media change the next day, cells were incubated according to the manufacturer's instructions, changing CP+Torpedo media every 3 days. An extra media change was performed the day following transfection, after which a 3-day media change schedule was resumed.

### Cell Transection

[0933] PXB-cells were transfected 3 days following their receipt. Prior to transfection, a media change was performed for all wells. Spent media was aliquoted across multiple 96 well plates and stored at −80° C. For each condition, 200 ng sgRNA (Agilent and Synthego) and 600 ng editor mRNA (produced at Beam) were diluted to 25 μl with OPTIMEM (Thermo Fisher, 31985062) in a 96-well plate. Separately, the transfection reagent lipofectamine MessengerMAX Reagent (Thermo Fisher, LMRNA015) at 1.5× the total volume of RNA was diluted in the reduced-serum medium OPTIMEM to 25 μl for each condition, mixed thoroughly, and incubated at room temperature for 10 minutes. MessengerMAX solutions were then combined with the corresponding sgRNA+editor solution and thoroughly mixed. Following a 5-minute incubation at room temperature, the lipid encapsulated mRNA+sgRNA mixes were added dropwise onto the PXB-cells. Media was changed and spent media was discarded <16 hours following transfection.

[0934] PCH samples were transfected 4 days following the addition of 3T3-J2 feeder cells. Prior to transfection, a media change was performed for all wells. The same transfection protocol as that used for PXB-cells was used for PCH.

### Next Generation DNA Sequencing (NGS)

[0935] Following media collection, genomic DNA was isolated from each PXB-cell well 13-days post-transfection according to the following protocol. 200 μl of QuickExtract DNA Extraction Solution (Lucigen, QE09050) was added to each well. Cells were incubated for 5 minutes at 37° C., after which the cells were manually dislodged from the bottom of each well by pipetting. The cells were incubated again for 5 minutes at 37° C., after which the buffer-cell mixture was thoroughly mixed, and 150 μl was transferred to a 96-well plate. The 96-well plate was incubated at 65° C. for 15 mins and then at 98° C. for 10 mins.

[0936] PCR was performed using Phusion U Green Multiplex PCR Master Mix (Fisher Scientific, F564L) and region-specific primers. A second round of PCR was then performed on the first round PCR products to add barcoded Illumina adaptor sequences to each sample. Second round PCR products were purified using SPRIselect beads (Thermo Fisher Scientific, B23317) at a 1:1 bead to PCR ratio. The combined library concentration was quantified using a Qubit 1× dsDNA HS Assay Kit (Thermo Fisher Scientific, Q33231), and the library was sequenced using a Miseq Reagent Micro Kit v2 (300-cycles) (Illumina, MS-103-1002). Reads were aligned to appropriate reference sequences and editing efficiency was assessed at the appropriate sites.

[0937] Genomic DNA isolation, NGS, and analysis were performed as above for PCH. The library was sequenced using a Miseq Reagent Nano Kit v2 (300-cycles) (Illumina, MS-103-1001).

### TTR Protein Quantification

[0938] A human prealbumin (TTR) ELISA kit (Abcam, ab231920) was used to measure TTR protein levels in PXB-cell supernatants at various timepoints pre- and post-transfection. PXB-cell supernatants were thawed at room temperature and centrifuged at 2000×g for 10 minutes at 4° C. Supernatants were then diluted 1:1000 in provided Sample Diluent NS buffer prior to loading on the ELISA plate. The ELISA assay was then performed according to manufacturer's instructions. Samples were allowed to develop for 18 minutes in Development solution prior to addition of Stop solution. Absorbance was read at 450 nm using an Infinite M Plex plate reader (Tecan).

[0939] For the detection of cyno (Macacafascicularis) TTR protein in primary cyno hepatocyte co-culture supernatants, known concentrations of purified cyno TTR protein (Abcam, ab239566) were used to assess cross reactivity of the human TTR ELISA kit (Abcam, ab231920). Through this approach, it was determined that the kit was approximately 4% cross-reactive with cyno TTR protein. Purified cyno TTR protein was then used to generate a new set of standards (20 ng-0.3125 ng for standards 1-7) capable of accurately measuring cyno TTR protein levels. The assay was otherwise performed identically to manufacturer's instructions. Supernatants were diluted 1:1000 and were developed for 17 minutes in Development solution prior to addition of Stop solution.

### Example 5. Transthyretin (TTR) Promoter Screening for Gene Expression Knockdown

[0940] Experiments were undertaken to develop base editor systems suitable for knocking out expression of the TTR gene in humans through introducing alterations to the promoter region of the gene.

[0941] Sequence homology between the murine (see, Costa, R. H. & Grayson, D. R. Site-directed mutagenesis of hepatocyte nuclear factor (HNF) binding sites in the mouse transthyretin (TTR) promoter reveal synergistic interactions with its enhancer region. Nucleic Acids Res 19, 4139-4145 (1991), the disclosure of which is incorporated herein by reference in its entirety for all purposes; GGCAAGGTTCATATTTGTGTAGGTTACTTATTCTCCTTTTGTTGACTAAGTCAATAATCAGAAT CAGCAGG (SEQ ID NO: 582)) and human TTR promoter regions was used to define the human promoter region to guide the design of guide RNA sequences for use in knocking out TTR in humans (FIGS. 9A and 9B).

[0942] gRNAs corresponding to four CRISPR-Cas enzymes with 3′ PAMs NGG, NGA, NNGRRT and NNNRRT were designed to tile the reported promoter region (FIGS. 9A and 9B). A base editing strategy was designed to generate mutations within the promoter region that would knock down TTR mRNA expression. 3′ NGG PAM gRNAs were designed to be paired with an S. pyogenes CRISPR-Cas9-containing base editor. 3′ NGA PAM gRNAs were designed to be paired with a mutated S. pyogenes CRISPR-Cas9-containing base editor. 3′ NNGRRT PAM gRNAs were designed to be paired with an S. aureus CRISPR-Cas9-containing base editor. 3′ NNNRRT PAM gRNAs were designed to be paired with a mutated S. aureus CRISPR-Cas9-containing base editor.

[0943] An in silico off-target analysis of these gRNAs was run and any gRNAs with a 0, 1, 2 or 3 nucleotide mismatch to a tumor suppressor gene were excluded from the screen due to potential off-target effects. The gRNA list was filtered further to remove any gRNAs with 0 or 1 mismatch to any location in the human genome and 0, 1 or 2 mismatches to any exon in the human genome. This filtered list contained 47 unique gRNAs that covering the target promoter region (FIG. 9). These 47 gRNAs could be paired with either an Adenine Base Editor (ABE) or Cytosine Base Editor (CBE) to make 94 unique guide-base editor type combinations.

DNA Editing Efficiency for gRNAs with Base Editors

[0944] A cellular screen for gRNA potency was undertaken. This screen used mRNA encoding for the base editor of interest and a chemically synthesized, chemically end-protected gRNA. The screening was performed in HepG2 human cells. Three replicates were transfected into cells on the same day. DNA was harvested for next generation sequencing three days post-transfection.

[0945] Positive controls for genome editing were the following: a gRNA-mRNA pair that was known to have good editing efficiencies and did not target DNA predicted to have any impact on TTR mRNA expression (sgRNA_088 paired with NGG-SpCas9-ABE8.8), three gRNA-base editor pairs targeting splice sites within the TTR gene (gRNAs sg_361, sg_362, gRNA1597 and gRNA1604 [reference prior filings on these gRNAs]), and one Cas9 nuclease combined with a gRNA known to be suitable for inducing TTR knockdown in human (Cas9 nuclease+gRNA991) (Gillmore, J. D. et al. CRISPR-Cas9 In Vivo Gene Editing for Transthyretin Amyloidosis. New Engl.J Med 385, 493-502 (2021)).

[0946] Negative controls for genome editing were the following: no treatment, and a catalytically dead Cas9 nuclease plus gRNA991 (dead Cas9 nuclease+gRNA991).

[0947] Each gRNA for the promoter screen was paired with either a CBE (here using the ppAPOBEC1 deaminase described in Yu, Y. et al. Cytosine base editors with minimized unguided DNA and RNA off-target events and high on-target activity. Nat Commun 11, 2052 (2020)) or an ABE (here using ABE8.20, described in Gaudelli, N. M. et al. Directed evolution of adenine base editors with increased activity and therapeutic application. Nat Biotechnol 38, 892-900 (2020)). Next-generation sequencing (NGS) data indicated that, when paired with CBEs, 22/46 promoter tiling gRNAs yielded mean editing frequencies >80% and 9/46 gRNAs yielded editing frequencies <10%. (FIG. 10). When paired with ABEs, 24/47 promoter tiling gRNAs yielded >80% mean editing frequency, and 4/47 gRNAs yielded mean editing frequencies <10%.

TTR Knockdown Efficiency Resulting from Promoter Editing

[0948] TTR Knockdown efficiency was measured using RT-qPCR for all promoter screening gRNAs and the control gRNAs. One of the gRNAs that served as a positive control for DNA editing also served as a negative control for TTR knockdown: the gRNA-mRNA pair that typically yielded high editing efficiencies and did not target DNA known to have any impact on TTR mRNA expression (sgRNA_088 paired with NGG-SpCas9-ABE8.8). The other negative controls included no treatment controls, which were used in each plate run for RT-qPCR, and a catalytically dead Cas9 combined with gRNA_991.

[0949] Positive controls for TTR knockdown were the following: three previously identified gRNA-base editor pairs targeting splice sites within the TTR gene (gRNAs sg_361, sg_362, gRNA1597) and one Cas9 nuclease combined with a gRNA known to induce TTR knockdown in humans (Cas9 nuclease+gRNA991).

[0950] An internal control (ACTB) with an orthogonal fluorescent probe to the test probe (TTR) was used to enable RT-qPCR samples to be accurately compared between wells. Fold-change differences in TTR mRNA abundance between the no treatment controls and each test treatment well was measured using the mean of the ΔCt(TTR−ACTB)_{control} for the no treatment wells present in each plate. The approach used to find relative TTR expression level was 2\hat{ }(−1*(ΔCt(TTR−ACTB)ₛₐₘₚₗₑ−ΔCt(TTR−ACTB)_{control}) (Livak, K. J. & Schmittgen, T. D. Analysis of Relative Gene Expression Data Using Real-Time Quantitative PCR and the 2-ΔΔC T Method. Methods 25, 402-408 (2001)). Untreated cells had a different TTR:ACTB ratio from transfected cells, which led to an artificially reduced relative TTR expression (0.30-0.42) in cells transfected with the negative control catalytically dead Cas9 editor or gRNA that did not affect TTR expression. Nonetheless, this approach was suitable as a relative approach to compare TTR knockdown efficacy between different transfection conditions.

[0951] In total, 21/94 base editor-gRNA combinations (which are notated throughout this disclosure as “Base_Editor_Name_gRNA_name”) tested showed comparable or greater TTR knockdown than the positive control gRNA_991 (FIGS. 12A and 12B). Of five potent promoter tiling gRNAs, one, when combined with an ABE, edited the sequence proposed to be the TATA box for TTR (gRNA1786), and one, when combined with an ABE, disrupted the ATG start codon (gRNA1772). The other three bind elsewhere in the promoter region.

[0952] The following materials and methods were employed in this Example.

### Cell Transection

[0953] HepG2 cells were plated into a 48-well poly-D-lysine (PDL)-coated plate (Corning, 354509) at a density of 25,000 cells/well in 200 μL of supplemented media 24-hours prior to transfection. On the day of transfection, 600 ng of mRNA encoding for the desired editor (produced at Beam) and 200 ng chemically end-protected gRNA (IDT) was aliquoted out and into 96-well plates. Lipofectamine MessengerMax (Thermo Fisher, LMRNA015) was diluted in Optimem (Thermo Fisher, 31985062), vortexed thoroughly and incubated at room temperature for at least 5 minutes before being added onto the pre-aliquoted mRNA and gRNA mix at a final concentration of 1.5 μL MessengerMax lipid per well. The lipid encapsulated mRNA and gRNA mix was incubated at room temperature for 10-20 mins before being added onto cell plates.

### Cell Culture

[0954] HepG2 cells (ATCC, HB8065) were cultured according to the manufacturer's protocols and split at least every four days. Cells were cultured in EMEM (Gibco, 670086), supplemented with 10% Fetal Bovine Serum (Thermo Fisher, A3160401).

Next Generation DNA sequencing (NGS)

[0955] DNA was harvested from transfected cells 3 days post-transfection. Media was removed from cells and 100 μL of thawed Quick Extract lysis buffer (Lucigen, QEP70750) was added to each well. The buffer-cell mixture was incubated at 65° C. for 8 mins and then at 98° C. for 15 mins. PCR was performed to amplify the gRNA target region each sample. A second round of PCR was performed to add barcoding adapters onto the product from PCR1. The resulting product was purified and sequenced using a 300-kit on a Miseq (Illumina). DNA sequence alignment with a reference sequence and editing quantification was performed on the resulting sequences. Maximum editing (plotted in FIGS. 10 and 11) corresponded to the highest value for either an A-to-G edit or a C-to-T edit for any base within a gRNA protospacer and PAM region.

### RT-qPCR

[0956] Cells were frozen down 5 days post-transfection. Media was removed from each well and the resulting plates were sealed and stored at −80° C. RNA was harvested subsequently using the RNeasy PLUS kit (Qiagen) in 96 well plate format according to the manufacturer's instructions (74192). After RNA was isolated, Taqpath 1-step RT-qPCR Master Mix CG (Thermo Fisher, A15299) with two probes: ACTB with VIC (4448489) and TTR with FAM (4331182), all Thermo Fisher. The probes were used according to the manufacturer's instructions with 0.5 μL of RNA input in a 20 μL reaction to assess relative expression level of TTR. Quantstudio 7 (Thermo Fisher) was used to run the RT-qPCR assay. Three technical replicates were run per plate. Auto thresholds for Ct values were used for each individual value. Any replicates indicating no amplification or inconclusive amplification were excluded from the analysis, resulting in a few samples having only two technical replicates. To calculate relative expression of TTR, the \hat{ }(−1*(ΔCt(TTR−ACTB)ₛₐₘₚₗₑ−ΔCt(TTR−ACTB)_{control}) approach (Livak, K. J. & Schmittgen, T. D. Analysis of Relative Gene Expression Data Using Real-Time Quantitative PCR and the 2-ΔΔC T Method. Methods 25, 402-408 (2001)) was used.

### Example 6. Transthyretin (TRR) Guide Screening and Functional Knockdown Assessment in Hek293T Cells

[0957] Fourteen guide RNAs were designed using a base-editing strategy for splice-site disruption using ABE7.10 alternative PAM editors or IBE variants, for a total of 26 new experimental combinations. Nine (9) tested combinations demonstrated good editing efficiencies in Hek293T cells (FIG. 13).

[0958] Editor mRNA and sgRNAs were transfected in triplicate into Hek293T cells. Spacer sequences for the sgRNAs are provided in Table 2B. All sgRNAs were ordered from IDT with 80-mer spCas9 scaffolds. In addition to the 26 experimental combinations, gRNA991 known to induce TTR knockdown in humans (Gillmore, J. D. et al. CRISPR-Cas9 In Vivo Gene Editing for Transthyretin Amyloidosis. New Engl J Med 385, 493-502 (2021)) combined with spCas9, and no treatment were used as positive and negative controls, respectively. Genomic DNA was harvested 72 hours after transfection and sequenced using Next Generation Sequencing. Total editing resulting in splice site disruption was detected in a range from ˜79%-0.4% depending on the condition, with some combinations yielding total editing resulting in splice disruption in a range between 79% to 63.5%. Most editor variants exhibited detectable editing at target loci. The following combinations displayed relatively high levels of editing: ISLAY3-VRQR_gRNA1604; ISLAY3-MQKFRAER_gRNA1597; ABE7.10-MQKFRAER_gRNA1597; ISLAY3_gRNA1599; ISLAY3_gRNA1600; ABE7.10-MQKFRAER_gRNA1594; ISLAY6_gRNA1599; ISLAY6-MQKFRAER_gRNA1597; ISLAY3-MQKFRAER_gRNA1601. For a description of the internal base editors (ISLAY) see Tables 4 and 7. The internal base editors (i.e., ISLAY3 and ISLAY6, each contained a TadA*7.10 deaminase domain. The internal base editors are described in PCT/US20/16285, the disclosure of which is incorporated herein by reference in its entirety for all purposes. In particular, the combination of gRNA1604 and ISLAY3-VRQR exhibited editing efficiencies at ˜79%. The combination of gRNA1597 with both ISLAY3-MQKFRAER and ABE7.10 exhibited good editing efficiencies as well.

[0959] The following materials and methods were employed in Example.

### Hek293T Cell Culture and Maintenance

[0960] A frozen vial of Hek293T cells at passage count 3 was thawed and mixed with 15 mL of pre-warmed DMEM high glucose pyruvate medium (Thermofisher, 11995065) with 10% Fetal Bovine Serum (Thermofisher, A3160401) and Pen/Strep (Thermofisher, 10378016), and plated on a T75 tissue-culture treated flask (Corning, 430641U) at 37° C. in a 5% CO2 incubator (Thermofisher 51033547). The media was aspirated and replaced the next morning, and every other day thereafter. Upon reaching 70-80% confluency after 3 days, the cells were split at 1:20 via aspiration of media followed by incubation with 2 mL TrypLE (Thermofisher 12605036) for 3 minutes, gentle agitation and pipette mixing, and transfer of 100 μL into 15 mL pre-warmed media again. This process was repeated after another 5 days, during which time cell counts were obtained by averaging two results obtained from a NucleoCounter NC-200 after diluting the 2 mL of TrypLE cell suspension obtained from the flask in 10 mL of media. The cells were then seeded into Poly-D-Lysine 48-well plates (Corning, 354509) at 25 k cells/well in 200 μL of media.

### Cell Transection

[0961] Hek293T cells were transfected the day after seeding. The media was changed prior to transfection. Each well received 200 ng gRNA (Synthego custom order) (sequences for the guide RNA's are provided in Tables 1 and 2B; gRNA991 contained the spacer sequence AAAGGCUGCUGAUGACACCU (SEQ ID NO: 565) and 600 ng mRNA with 1.5 μL Lipofectamine MessengerMax (Thermofisher, LMRNA150). Guide RNAs were reconstituted from lyophilized form in water at lmg/mL, and mRNA was received at 2 mg/mL. gRNA/mRNA and reagent were separately added to 26 μL OptiMEM (Thermofisher, 31985062) per well as half mixes and incubated for 10 minutes, after which the RNA and reagent half mixes were combined and incubated for another 5 min. 54 μL of the combined mastermix was added dropwise to each target culture well. The plates were then briefly and gently nutated and placed at 37° C. and 5% CO₂ in the incubator. Media was changed the following day.

### Next Generation DNA Sequencing (NGS)

[0962] 72 hours after transfection, media was aspirated and genomic DNA was isolated with lysis buffer solution of 10 mM Tris-HCl pH8.0, 0.05% SDS, 50 ug/mL proteinase K (Thermofisher, E00491). 200 μL of lysis buffer was added per well, and the plates were incubated at 37° C. for 45 minutes, after which the samples were vigorously mixed and 100 μL of the volume was transferred to a 96-well PCR plate. The plate was incubated at 95° C. for 15 minutes and 1 μL was transferred into a PCR mixture. PCR was performed using Q5 Hotstart 2× Mastermix (M0494L) and target site-specific amplicon primers. 25 μL of mastermix, SuM each of forward and reverse primer, and to 50 μL of water were used per well. A second round of barcoding PCR was performed with half the volume. PCR products were pooled by amplicon sequence and 166 μL was added to 33 μL Purple 6× Dye (B7024S) and gel extracted in 1% agarose, then purified twice using Zymo Gel Extraction (D4007) and PCR Cleanup (D4013) kits, eluting in 150 μL 10 mM Tris pH7.5. The library concentration was quantified via NanoDrop (Thermofisher, ND-ONE-W), and standardized to 4 nM. Sequencing was performed using a MiSeq Reagent Kit v2 (500 cycles) (Illumina, MS-102-2003), with read alignment to reference sequences and editing efficiency was computationally analyzed.

[0963] The following methods were employed in the above examples.

### General HEK293T Mammalian Culture Conditions

[0964] Cells were cultured at 37° C. with 5% CO₂. HEK293T cells [CLBT×013, American Type Cell Culture Collection (ATCC)] were cultured in Dulbecco's modified Eagles medium plus Glutamax (10566-016, Thermo Fisher Scientific) with 10% (v/v) fetal bovine serum (A31606-02, Thermo Fisher Scientific). Cells were tested negative for mycoplasma after receipt from supplier.

### Lipotransfection

[0965] HEK293T cells were seeded onto 48-well well Poly-D-Lysine treated BioCoat plates (Corning) at a density of 35,000 cells/well and transfected 18-24 hours after plating. Cells were counted using a NucleoCounter NC-200 (Chemometec). A solution was prepared containing Opti-MEM reduced serum media (ThermoFisher Scientific), the base editor, nuclease, or control mRNA, and sgRNA. The solution was combined with Lipofectamine MessengerMAX (ThermoFisher) in Opti-MEM reduced serum media and left to rest at room temperature for 15 min. The resulting mixture was then transferred to the pre-seeded Hek293T cells and left to incubate for about 120 h.

### DNA Extraction and Analysis of Editing

[0966] Cells were harvested and DNA was extracted. For DNA analysis, cells were washed once in 1×PBS, and then lysed in 100 μl QuickExtract™ Buffer (Lucigen) according to the manufacturer's instructions.

[0967] Genomic DNA was sequences using Illumina Miseq sequencers following PCR to amplify edited regions.

mRNA Production

[0968] All base editor and bhCas12b mRNA was generated using the following synthesis protocol. Base editors or bhCas12b were cloned into a plasmid encoding a dT7 promoter followed by a 5′UTR, Kozak sequence, ORF, and 3′UTR. The dT7 promoter carries an inactivating point mutation within the T7 promoter that prevents transcription from circular plasmid. This plasmid templated a PCR reaction (Q5 Hot Start 2× Master Mix), in which the forward primer corrected the SNP within the T7 promoter and the reverse primer appended a polyA tail to the 3′ UTR. The resulting PCR product was purified on a Zymo Research 25 μg DCC column and used as mRNA template in the subsequent in vitro transcription. The NEB HiScribe High-Yield Kit was used according to the instruction manual, but with full substitution of N1-methyl-pseudouridine for uridine and co-transcriptional capping with CleanCap AG (Trilink). Reaction cleanup was performed by lithium chloride precipitation. Primers used for amplification can be found in Table 22.

TABLE 22
Primers used for ABE8 T7
in vitro transcription reactions

| Name | Sequence |
|---|---|
| fwd_IVT | TCGAGCTCGGTACCTAATACGACTCAC |
| | (SEQ ID NO: 451) |
| rev_IVT | TTTTTTTTTTTTTTTTTTTTTTTTTTT |
| | TTTTTTTTTTTTTTTTTTTTTTTTTTT |
| | TTTTTTTTTTTTTTTTTTTTTTTTTTT |
| | TTTTTTTTTTTTTTTTTTTTTTTTTTT |
| | TTTTTTTTTTTTCTTCCTACTCAGGCT |
| | TTATTCAAAGACCA |
| | (SEQ ID NO: 452) |

### Other Embodiments

[0969] From the foregoing description, it will be apparent that variations and modifications may be made to the invention described herein to adopt it to various usages and conditions. Such embodiments are also within the scope of the following claims.

[0970] The recitation of a listing of elements in any definition of a variable herein includes definitions of that variable as any single element or combination (or subcombination) of listed elements. The recitation of an embodiment herein includes that embodiment as any single embodiment or in combination with any other embodiments or portions thereof.

[0971] All patents and publications mentioned in this specification are herein incorporated by reference to the same extent as if each independent patent and publication was specifically and individually indicated to be incorporated by reference.

The application's sequence listing, which the Patent Office published only in electronic form, follows.

SEQUENCE LISTING (1160 sequences)

SEQ ID NO: 1 - protein, 147 aa, Homo sapiens
MASHRLLLLCLAGLVFVSEAGPTGTGESKCPLMVKVLDAVRGSPAINVAVHVFRKAADDTWEPFASGKTSESGELHGLTTEEEFVEGIYKVEIDTKSYWKALGISPFHEHAEVVFTANDSGPRRYTIAALLSPYSYSTTAVVTNPKE

SEQ ID NO: 2 - DNA, 444 bp, Homo sapiens
  source 1..444: mol_type = other DNA
atggcttctcatcgtctgctcctcctctgccttgctggactggtatttgtgtctgaggctggccctacgggcaccggtgaatccaagtgtcctctgatggtcaaagttctagatgctgtccgaggcagtcctgccatcaatgtggccgtgcatgtgttcagaaaggctgctgatgacacctgggagccatttgcctctgggaaaaccagtgagtctggagagctgcatgggctcacaactgaggaggaatttgtagaagggatatacaaagtggaaatagacaccaaatcttactggaaggcacttggcatctccccattccatgagcatgcagaggtggtattcacagccaacgactccggcccccgccgctacaccattgccgccctgctgagcccctactcctattccaccacggctgtcgtcaccaatcccaaggaatga

SEQ ID NO: 3 - DNA, 14258 bp, Homo sapiens
  source 1..14258: mol_type = other DNA
ttatgtgtttattcaacaatggcggaggagaggcatgccagataaggcagacacgggcattccaaacacaagaaaggtatgtgctgcagagaagtcagataactttcctaggctctcctgcagtccggatgaaatactctcaaaaaattagcccgggccctttgctccaatttttcgcttacctagcaaccatctaactattaattaaattggtattatggttttaacatgaatcttttatgatttgcttaccattaatcaaacccccgaggcttattcacctcaaggggagctgacaaagttgaattattcaacctgcaaagatccagggcccccaaatactgtcatttccactctcccctaacccccaccatgaggcccagtctcagcactcggccagcctatgcccaactcggggtaatcagcttagacatattaatattagtgggcatttcagtatcaacagatcactgtctagcagctgacaggcaccctcagaaaataaaccaagaagaaagggtttatctataatatcaaaatttttcatagataaacctgcccattataaggaagagggcagaagaaccctaaactaagagccaggcaacttgttcattaatcacagcatattccatagaaggaggagaaatgttgtcatcaaattcatctttttcacctcaattaaacatctatgctacagctccacagtcagattgagaggaaaaacagtacgtagctaagaaaagacatagacttgtaactgaaatgcttcactggtgctccttttgttttaaggcattggatcttcatagctactgatcgtgcccaagcacacagtatctgcagcaaccacttaggcctccaggaatgtggtgaccattgaccctaattcattccccttcatggatcctatgtaaccatcctccaaaaagagctttcgcaaactcaaataaacacaggaaaggaagaccttcttatctttgagagtatatgtttagccctataaccctctcttatcataaattgcttcttaggcaagaaacactggatttttcttgtatttgtcattgccattggttccatacaagcattcatttaacaaataatacattccatctccgttttttgctttttccttcatgcttcggccttggttttctctcacctaaaacactacaagcttcttctcccagagctctcactttgactccagactacctacatttaatctttaattctctaccaaaattttctcttatctttatatctttttaattttaattttattttttgtggatacatagtaggtgtatatatttatggggtacatgcaatgttttaatacaggcatgcaatgtgaaataaggacatcatggagaatggggtatccatctcctcaagcatttatcttttcagttacaaacaatccaattacactctttattttaaaatatacaattattaattatagtcactctgttgtgctatcaaatagtagatcttattctttctattttttgtaccctctcgtctttttatattaaaaaataatctttatctctgtaagcttcatcagtgattttccaatgaaatttaggatcttctctataccctgaattgccttactttctccccacttccttgtcttattcaaatgcagatttcattaatgatttccagatcaatgatagttcagaaagcaagcaagtcaaagtgaccaagggcatggcctgaaaactgttctaagagaggaatttacagaacaactattaaatgatgtcaataggattgtattagtccgttttcatacggctataaagaactgcctgagactgggtaatttataaaggaaagaggtttaattgactcacagttcagcacaactgggcaggcctcaggaaacttacaatcatggtagaaggtgaaggggaagcaaagcaccttcctcacaaggcgtcaggaagaagtgccaagcaaagggggaaaagccccttgtaaaactaccagaacctgtgagaactcaatcactatcacaagaacagcatgagggaaccgcccctcgtgattcaattacctccacctggtctctcccttgacacatggggattatgggtgttacaattcaagatgagatttgggtggggacacaaagcctaaccatatcaaggatcaagtggtgggttgaaactaacaggatgagatatatcagatacaaacacagggtcccatatttgggttaaaattcataaatgatcaaagcacaggatgacagataatataggtcattttagattattgtggccaacagatcacagtgggtagtgttatgacgaagggagggtcacagttactacagttacagatggattctgggtacaacatttgcactaaagtgcctttgccaagggaggcaacagtctcgacatcctgtggcctgatctacttcagggactgtgtcttgttcagagcatcacatttgaagagaactttgaccaaggggaatatgccagaaaaggaagttcgggatgctgaggatcttaggaactatgtctaaacaagattcattcacagaagtgggaatgtctatttggcaaaaagaaaatactacttacatggctgttggaagaccagcaatcacaaactcagtttttcaaaaggctgggcagaaacacagatgaaagaaacaggccatgtttaagaaaagataaaagctcacgcatgatatgccactagagaatcacctagcctcagtgttggcggggaggcctggggagtcttgatgtctgagagtgacattctgatgatcactgtcatgtgtaaatgttggcctaaagctgccaatatttttgatttaagagaagcaagaaatgcaaatttttatgcagcatgtctcaatttttaattttggcaactattacaaaatgtttaaagagactctgtgcagcccaaatataacatatctatgggctgatggcagcccagcgttgccagttcacagggtctacaagagatgattcttagtttcaacagggtgcagtgctgaaacgcgtgcacagtagattttgcttcggttatgaaagaacttccaaatatttatgattcatagccagagaaaaggctctctatccaggttctgaacaataggaaatcatcaagaggatattggatgacaatatatgaaagatgttatttgagaaaggattctctcctgaggcatagatgttgaaccaaattctattagttatgcttttacagcaagatagtggtttacagcttacaaaaggcttgtacatcctctcatattaaaagttattagaacagtcctttgaagtagaaaagtaggcatttctattttacaaacgagttggccgagtatctgagatagtagataactcatagaaggtcatccgggaaacggggcagcagaactgggatcgaatgactctggtcatccaactccaaatgcaaaagtctttctgctgctgcttcctagttaaactctaagggtctaagactccattcctagttatggtctcaactacatttgctcattgctgtgaggggtcaacccacctcccggagtcctctcctgcacattctcatgttcctgaaaggcttttctgtcccttccactactccctgtaagctcctgtgcttcacaatttcttgttgaattttttctaatctgactctatcagttatgggaatgttccctcaattcttagtgctccaaaccggacttgctcttggcttgtatttgtccaaaatatttgtcttctctatgttttctacatgtttgtcttataaggacaaaaacctgccttagtttatccatgaacaaagccacgcatgctagtggacacacacacacatgcgcgtgcgcgcgcacacacacacacacacacatacacacagagactttgtatgtgagtaatgaatcatcaaatcatcataatttctggacttgtattaataagtcggccaggaggaaaagaatctgctgtcaatcatggcttctggttctcacagtcatctctactttcttccagcaagtttggttctgtcaaaaaccagctgtcagccttgttcctgcatgcccaatgcagaagagtcagtaaagaagatttggttctctgtatttcaggggcatcaatgccaggttgaaatatgccattctggcccagctcagtggctcacacgtgtaatcccagcactttggaaggccaaagcgggtggattgcttgagctcaggagttcgagaccagcctgggcaagaggctgaggtgggaggatgacctgagcccgggaggtcaaggctgcagcgagctgtgatcgtgccactgcactcgagccagggcgttggagtgagaccctgtcaaaaaaaaaaaaaaaaaggaaggaaaaaaggaaggaaggaagggagggagggaagatgccattcttagattgaagtggactttatctgggcagaacacacacacacatacacacatgcacacacacattgtggagaaattgctgactaagcaaagcttccaaatgacttagtttggctaaaatgtaggcttttaaaaatgtgagcactgccaagggtttttccttgttgacccatggatccatcaagtgcaaacattttctaatgcactatatttaagcctgtgcagctagatgtcattcaacatgaaatacattattacaacttgcatctgtctaaaatcttgcatctaaaatgagagacaaaaaatctataaaaatggaaaacatgcatagaaatatgtgagggaggaaaaaattacccccaagaatgttagtgcacgcagtcacacagggagaagactatttttgttttgttttgattgttttgttttgttttggttgttttgttttggtgacctaactggtcaaatgacctattaagaatatttcatagaacgaatgttccgatgctctaatctctctagacaaggttcatatttgtatgggttacttattctctctttgttgactaagtcaataatcagaatcagcaggtttgcagtcagattggcagggataagcagcctagctcaggagaagtgagtataaaagccccaggctgggagcagccatcacagaagtccactcattcttggcaggatggcttctcatcgtctgctcctcctctgccttgctggactggtatttgtgtctgaggctggccctacggtgagtgtttctgtgacatcccattcctacatttaagattcacgctaaatgaagtagaagtgactccttccagctttgccaaccagcttttattactagggcaagggtacccagcatctatttttaatataattaattcaaacttcaaaaagaatgaagttccactgagcttactgagctgggacttgaactctgagcattctacctcattgctttggtgcattaggtttgtaatatctggtacctctgtttcctcagatagatgatagaaataaagatatgatattaaggaagctgttaatactgaattttcagaaaagtatccctccataaaatgtatttgggggacaaactgcaggagattatattctggccctatagttattcaaaacgtatttattgattaatctttaaaaggcttagtgaacaatattctagtcagatatctaattcttaaatcctctagaagaattaactaatactataaaatgggtctggatgtagttctgacattattttataacaactggtaagagggagtgactatagcaacaactaaaatgatctcaggaaaacctgtttggccctatgtatggtacattacatcttttcagtaattccactcaaatggagacttttaacaaagcaactgttctcaggggacctattttctcccttaaaattcattatacacatccctggttgatagcagtgtgtctggaggcagaaaccattcttgctttggaaacaattacgtctgtgttatactgagtagggaagctcattaattgtcgacacttacgttcctgataatgggatcagtgtgtaattcttgtttcgctccagatttctaataccacaaagaataaatcctttcactctgatcaattttgttaacttctcacgtgtcttctctacacccagggcaccggtgaatccaagtgtcctctgatggtcaaagttctagatgctgtccgaggcagtcctgccatcaatgtggccgtgcatgtgttcagaaaggctgctgatgacacctgggagccatttgcctctgggtaagttgccaaagaaccctcccacaggacttggttttatcttcccgtttgcccctcacttggtagagagaggctcacatcatctgctaaagaatttacaagtagattgaaaaacgtaggcagaggtcaagtatgccctctgaaggatgccctctttttgttttgcttagctaggaagtgaccaggaacctgagcatcatttaggggcagacagtagagaaaagaaggaatcagaactcctctcctctagctgtggtttgcaacccttttgggtcacagaacactttatgtaggtgatgaaaagtaaacattctatgcccagaaaaaatgcacagatacacacacatacaaaatcatatatgtgattttaggagtttcacagattccctggtgtccctgggtaacaccaaagctaagtgtccttgtcttagaattttaggaaaaggtataatgtgtattaacccattaacaaaaggaaaggaattcagaaatattattaaccaggcatctgtctgtagttaatatggatcacccaaaacccaaggcttttgcctaatgaacactttggggcacctactgtgtgcaaggctgggggctgtcaagctcagttaaaaaaaaaaagatagaagagatggatccatgaggcaaagtacagccccaggctaatcccacgatcacccgacttcatgtccaagagtggcttctcaccttcattagccagttcacaattttcatggagtttttctacctgcactagcaaaaacttcaaggaaaatacatattaataaatctaagcaaagtgaccagaagacagagcaatcaggagaccctttgcatccagcagaagaggaactgctaagtatttacatctccacagagaagaatttctgttgggttttaattgaaccccaagaaccacatgattcttcaaccattattgggaagatcattttcttaggtctggttttaactggctttttatttgggaattcatttatgtttatataaaatgccaagcataacatgaaaagtggttacaggactattctaagggagagacagaatggacaccaaaaatattccaatgttcttgtgaatcttttccttgcaccaggacaaaaaaaaaaagaagtgaaaagaagaaaggaggaggggcataatcagagtcagtaaagacaactgctatttttatctatcgtagctgttgcagtcaaatgggaagcaatttccaacattcaactatggagctggtacttacatggaaatagaagttgcctagtgtttgttgctggcaaagagttatcagagaggttaaatatataaaagggaaaagagtcagatacaggttcttcttcctactttaggttttccactgtgtgtgcaaatgatactccctggtggtgtgcagatgcctcaaagctatcctcacaccacaagggagaggagcgagatcctgctgtcctggagaagtgcagagttagaacagctgtggccacttgcatccaatcatcaatcttgaatcacagggactctttcttaagtaaacattatacctggccgggcacggtggctcacgcctgtaatcccagcactttgggatgccaaagtgggcatatcatctgaggtcaggagttcaagaccagcctggccaacatggcaaaactccgtctttatgaaaaatacaaaaattagccaggcatggtggcaggcgcctgtaatcccagctaattgggaggctgaggctggagaatcccttgaatctaggaggcagaggttgcagtgagctgagatcgtgccattgcactccagcctgggtgacaagagtaaaactctgtctcaaaaaaaaaaaattatacctacattctcttcttatcagagaaaaaaatctacagtgagcttttcaaaaagtttttacaaactttttgccatttaatttcagttaggagttttccctacttctgacttagttgaggggaaatgttcataacatgtttataacatgtttatgtgtgttagttggtgggggtgtattactttgccatgccatttgtttcctccatgcgtaacttaatccagactttcacaccttataggaaaaccagtgagtctggagagctgcatgggctcacaactgaggaggaatttgtagaagggatatacaaagtggaaatagacaccaaatcttactggaaggcacttggcatctccccattccatgagcatgcagaggtgagtatacagaccttcgagggttgttttggttttggtttttgcttttggcattccaggaaatgcacagttttactcagtgtaccacagaaatgtcctaaggaaggtgatgaatgaccaaaggttccctttcctattatacaagaaaaaattcacaacactctgagaagcaaatttctttttgactttgatgaaaatccacttagtaacatgacttgaacttacatgaaactactcatagtctattcattccactttatatgaatattgatgtatctgctgttgaaataatagtttatgaggcagccctccagaccccacgtagagtgtatgtaacaagagatgcaccattttatttctcgaaaacccgtaacattcttcattccaaaacacatctggcttctcggaggtctggacaagtgattcttggcaacacatacctatagagacaataaaatcaaagtaataatggcaacacaatagataacatttaccaagcatacaccatgtggcagacacaattataagtgttttccatatttaacctacttaatcctcaggaataagccactgaggtcagtcctattattatccccatcttatagatgaagaaaatgaggcaccaggaagtcaaataacttgtcaaaggtcacaagactaggaaatacacaagtagaaatgtttacaattaaggcccaggctgggtttgccctcagttctgctatgcctcgcattatgccccaggaaactttttcccttgtgaaagccaagcttaaaaaaagaaaagccacatttgtaacgtgctctgttcccctgcctatggtgaggatcttcaaacagttatacatggacccagtccccctgccttctccttaatttcttaagtcatttgaaacagatggctgtcatggaaatagaatccagacatgttggtcagagttaaagatcaactaattccatcaaaaatagctcggcatgaaagggaactattctctggcttagtcatggatgagactttcaattgctataaagtggttcctttattagacaatgttaccagggaaacaacaggggtttgtttgacttctggggcccacaagtcaacaagagagccccatctaccaaggagcatgtccctgactacccctcagccagcagcaagacatggaccccagtcagggcaggagcagggtttcggcggcgcccagcacaagacattgcccctagagtctcagcccctaccctcgagtaatagatctgcctacctgagactgttgtttgcccaagagctgggtctcagcctgatgggaaccatataaaaaggttcactgacatactgcccacatgttgttctctttcattagatcttagcttccttgtctgctcttcattcttgcagtattcattcaacaaacattaaaaaaaaaaaaaagcattctatgtgtggaacactctgctagatgctgtggatttagaaatgaaaatacatcccgacccttggaatggaagggaaaggactgaagtaagacagattaagcaggaccgtcagcccagcttgaagcccagataaatacggagaacaagagagagcgagtagtgagagatgagtcccaatgcctcactttggtgacgggtgcgtggtgggcttcatgcagcttcttctgataaatgcctccttcagaactggtcaactctaccttggccagtgacccaggtggtcatagtagatttaccaagggaaaatggaaacttttattaggagctcttaggcctcttcacttcatggatttttttttcctttttttttgagatggagttttgccctgtcacccaggctggaatgcagtggtgcaatctcagctcactgcaacctccgcctcccaggttcaagcaattctcctgcctcagcctcccgagtagctgggactacaggtgtgcgccaccacaccaggctaatttttgtattttttgtaaagacaggttttcaccacgttggccaggctggtctgaactccagacctcaggtgattcacctgtctcagcctcccaaagtgctgggattacaggtgtgagccaccgtgcccggctacttcatggatttttgattacagattatgcctcttacaatttttaagaagaatcaagtgggctgaaggtcaatgtcaccataagacaaaagacatttttattagttgattctagggaattggccttaaggggagccctttcttcctaagagattcttaggtgattctcacttcctcttgccccagtattatttttgtttttggtatggctcactcagatccttttttcctcctatccctaagtaatccgggtttctttttcccatatttagaacaaaatgtatttatgcagagtgtgtccaaacctcaacccaaggcctgtatacaaaataaatcaaattaaacacatctttactgtcttctacctctttcctgacctcaatatatcccaacttgcctcactctgagaaccaaggctgtcccagcacctgagtcgcagatattctactgatttgacagaactgtgtgactatctggaacagcattttgatccacaatttgcccagttacaaagcttaaatgagctctagtgcatgcatatatatttcaaaattccaccatgatcttccacactctgtattgtaaatagagccctgtaatgcttttacttcgtatttcattgcttgttatacataaaaatatacttttcttcttcatgttagaaaatgcaaagaataggagggtgggggaatctctgggcttggagacaggagacttgccttcctactatggttccatcagaatgtagactgggacaatacaataattcaagtctggtttgctcatctgtaaattgggaagaatgtttccagctccagaatgctaaatctctaagtctgtggttggcagccactattgcagcagctcttcaatgactcaatgcagttttgcattctccctaccttttttttctaaaaccaataaaatagatacagcctttaggctttctgggatttcccttagtcaagctagggtcatcctgactttcggcgtgaatttgcaaaacaagacctgactctgtactcctgctctaaggactgtgcatggttccaaaggcttagcttgccagcatatttgagctttttccttctgttcaaactgttccaaaatataaaagaataaaattaattaagttggcactggacttccggtggtcagtcatgtgtgtcatctgtcacgtttttcgggctctggtggaaatggatctgtctgtcttctctcataggtggtattcacagccaacgactccggcccccgccgctacaccattgccgccctgctgagcccctactcctattccaccacggctgtcgtcaccaatcccaaggaatgagggacttctcctccagtggacctgaaggacgagggatgggatttcatgtaaccaagagtattccatttttactaaagcagtgttttcacctcatatgctatgttagaagtccaggcagagacaataaaacattcctgtgaaaggcacttttcattccactttaacttgattttttaaattcccttattgtcccttccaaaaaaaagagaatcaaaattttacaaagaatcaaaggaattctagaaagtatctgggcagaacgctaggagagatccaaatttccattgtcttgcaagcaaagcacgtattaaatatgatctgcagccattaaaaagacacattctgtaaatgagagagccttattttcctgtaaccttcagcaaatagcaaaagacacattccaagggcccacttctttactgtgggcatttctttttttttctttttttcttttttccttttttgagacaaagtctcactctgttgcccaggctagaatgcagtggtgtaatctcagctcactgcaacctctgcttcctgggttcaagcgattctcctgcctcagcctcccaagtaactgggattacaggcgcatgccaccacgcctagctcatttttgtatttttagtagagatgggattttgccatgttggctaggctggtctacgaactcctgacctcaggtgatccacctgcctcagcctcccaaagtgctgggattacaggcatgagccactacacccggcccctactctgggcatttctttgattaaagagaaggggagctccaacaagatacacctgcagcaactcaggccgtctgatcagttcaggccagatctacactgcaaccagccaggtcaggggaaaaccaaagaaccccacacacccaatttacttaggctgatccaaaatccatgtatggagaactcacatgcaccaggcactattttaggtgaactgaatataaagaataggacccagtacctgcatttacttaaagaactcacaatcttttgagaacataactgtttcatcatggtttggcaggaggctatggtacaaggcacagcaagggtaagaaggaggaagaaaccaacaccctacagaaatcagggaatgactctgaataggtgtcacttaatctgagtgttggtaatttgtcagatagacaagggaaaaggtattctaggtagagagaatacagtttgcaaggcccagccaagtgaaacaatttgataagttgagagagcagacgacgattcagaatgttgaagggcaaaggtattgaggtgggatgggttatgctgctatcacaaataaccccaaatctcgggggcttaacaaagtaaaagtttagtctcagttgtgccaggtccaatgtagaactctttgctctagagactctttagggtggctttccttctaatggtgactgtttgagacagtttgatttagtcttgtggcttcaaggtcactctggtgatatttagccagcagactgagggaacatagtatggtattagacccctctgtgctgaagtgtcacacatgagtcccattgacttctcactggccagagctagttacatgcccccatctagatgtgctgagaaatgtggcccctggctgggagccatttcccagaacaactaactctatgctctggaagaggagcactaatctgagttggccaacaaccatctctaccacagtagggttgggactggtggggcatgaggctggagtgaaggttggttttatctgccacgcgttacagctgtgaatttgtcttgaaagcaacatgggtccattgaagggaaccttgacatcagtcatgtggctgggacaagaatagttaccacttgcccgtaatctccaaccaggattctccaggagaacctgagttagacacatggcttaggcctaaacctacctgagtggtctttctattttcctccaaattcaaatctcaaatcttgctaccctctaactggctatgttgagagaggaaaaaacttgaagagaatgcagtgtagctttggagtttttcacatgcacttttcccaagatacatagcaaaatcaatgtctccaattctattaatgttgttagcaagtccttgttccatgcatattggttaatccatagcaaattgccatttttatagactaaatggtcaaatattggcaatttcataaggttcagtctattacctaccatgattgtattggtcactaacctgcctatttttagaatgctacatattcatttggctgttgttaaatagctatggatttttataatcaaaacaggttgaaaatatgaatcagtttaaaaccacataca

SEQ ID NO: 4 - protein, 167 aa, Escherichia coli
  REGION 1..167: note = misc_feature - TadA*7.10 (ecTadA) polypeptide sequence
MSEVEFSHEYWMRHALTLAKRARDEREVPVGAVLVLNNRVIGEGWNRAIGLHDPTAHAEIMALRQGGLVMQNYRLIDATLYVTFEPCVMCAGAMIHSRIGRVVFGVRNAKTGAAGSLMDVLHYPGMNHRVEITEGILADECAALLCYFFRMPRQVFNAQKKAQSSTD

SEQ ID NO: 5 - DNA, 4092 bp, synthetic construct
  misc_feature 1..4092: note = Description of artificial sequence: BhCas12b GGSGGS-ABE8-Xten20 at P153 polynucleotide sequence
  misc_feature 1..6: note = Kozak sequence
  misc_feature 7..57: note = Sequence encoding N-terminal nuclear localization signal
  misc_feature 58..513: note = Sequence encoding BhCas12b
  misc_feature 514..531: note = Sequence encoding a linker
  misc_feature 532..1029: note = Sequence encoding TadA*8
  misc_feature 1030..1089: note = Sequence encoding Xten20 linker
  misc_feature 1090..3954: note = Sequence encoding BhCas12b
  misc_feature 3955..4002: note = Sequence encoding C-terminal NLS
  misc_feature 4003..4008: note = Seqquence encoding GS linker
  misc_feature 4009..4089: note = Sequence encoding 3x hemagglutinin (HA) tag
  source 1..4092: mol_type = other DNA
gccaccatggccccaaagaagaagcggaaggtcggtatccacggagtcccagcagccgccaccagatccttcatcctgaagatcgagcccaacgaggaagtgaagaaaggcctctggaaaacccacgaggtgctgaaccacggaatcgcctactacatgaatatcctgaagctgatccggcaagaggccatctacgagcaccacgagcaggaccccaagaatcccaagaaggtgtccaaggccgagatccaggccgagctgtgggatttcgtgctgaagatgcagaagtgcaacagcttcacacacgaggtggacaaggacgaggtgttcaacatcctgagagagctgtacgaggaactggtgcccagcagcgtggaaaagaagggcgaagccaaccagctgagcaacaagtttctgtaccctctggtggaccccaacagccagtctggaaagggaacagccagcagcggcagaaagcccagatggtacaacctgaagattgccggcgatcccggaggctctggaggaagctccgaagtcgagttttcccatgagtactggatgagacacgcattgactctcgcaaagagggctcgagatgaacgcgaggtgcccgtgggggcagtactcgtgctcaacaatcgcgtaatcggcgaaggttggaatagggcaatcggactccacgaccccactgcacatgcggaaatcatggcccttcgacagggagggcttgtgatgcagaattatcgactttatgatgcgacgctgtacgtcacgtttgaaccttgcgtaatgtgcgcgggagctatgattcactcccgcattggacgagttgtattcggtgttcgcaacgccaagacgggtgccgcaggttcactgatggacgtgctgcatcatccaggcatgaaccaccgggtagaaatcacagaaggcatattggcggacgaatgtgcggcgctgttgtgtcgtttttttcgcatgcccaggcgggtctttaacgcccagaaaaaagcacaatcctctactgacggctcttctggatctgaaacacctggcacaagcgagagcgccacccctgagagctctggctcctgggaagaagagaagaagaagtgggaagaagataagaaaaaggacccgctggccaagatcctgggcaagctggctgagtacggactgatccctctgttcatcccctacaccgacagcaacgagcccatcgtgaaagaaatcaagtggatggaaaagtcccggaaccagagcgtgcggcggctggataaggacatgttcattcaggccctggaacggttcctgagctgggagagctggaacctgaaagtgaaagaggaatacgagaaggtcgagaaagagtacaagaccctggaagagaggatcaaagaggacatccaggctctgaaggctctggaacagtatgagaaagagcggcaagaacagctgctgcgggacaccctgaacaccaacgagtaccggctgagcaagagaggccttagaggctggcgggaaatcatccagaaatggctgaaaatggacgagaacgagccctccgagaagtacctggaagtgttcaaggactaccagcggaagcaccctagagaggccggcgattacagcgtgtacgagttcctgtccaagaaagagaaccacttcatctggcggaatcaccctgagtacccctacctgtacgccaccttctgcgagatcgacaagaaaaagaaggacgccaagcagcaggccaccttcacactggccgatcctatcaatcaccctctgtgggtccgattcgaggaaagaagcggcagcaacctgaacaagtacagaatcctgaccgagcagctgcacaccgagaagctgaagaaaaagctgacagtgcagctggaccggctgatctaccctacagaatctggcggctgggaagagaagggcaaagtggacattgtgctgctgcccagccggcagttctacaaccagatcttcctggacatcgaggaaaagggcaagcacgccttcacctacaaggatgagagcatcaagttccctctgaagggcacactcggcggagccagagtgcagttcgacagagatcacctgagaagataccctcacaaggtggaaagcggcaacgtgggcagaatctacttcaacatgaccgtgaacatcgagcctacagagtccccagtgtccaagtctctgaagatccaccgggacgacttccccaaggtggtcaacttcaagcccaaagaactgaccgagtggatcaaggacagcaagggcaagaaactgaagtccggcatcgagtccctggaaatcggcctgagagtgatgagcatcgacctgggacagagacaggccgctgccgcctctattttcgaggtggtggatcagaagcccgacatcgaaggcaagctgtttttcccaatcaagggcaccgagctgtatgccgtgcacagagccagcttcaacatcaagctgcccggcgagacactggtcaagagcagagaagtgctgcggaaggccagagaggacaatctgaaactgatgaaccagaagctcaacttcctgcggaacgtgctgcacttccagcagttcgaggacatcaccgagagagagaagcgggtcaccaagtggatcagcagacaagagaacagcgacgtgcccctggtgtaccaggatgagctgatccagatccgcgagctgatgtacaagccttacaaggactgggtcgccttcctgaagcagctccacaagagactggaagtcgagatcggcaaagaagtgaagcactggcggaagtccctgagcgacggaagaaagggcctgtacggcatctccctgaagaacatcgacgagatcgatcggacccggaagttcctgctgagatggtccctgaggcctaccgaacctggcgaagtgcgtagactggaacccggccagagattcgccatcgaccagctgaatcacctgaacgccctgaaagaagatcggctgaagaagatggccaacaccatcatcatgcacgccctgggctactgctacgacgtgcggaagaagaaatggcaggctaagaaccccgcctgccagatcatcctgttcgaggatctgagcaactacaacccctacgaggaaaggtcccgcttcgagaacagcaagctcatgaagtggtccagacgcgagatccccagacaggttgcactgcagggcgagatctatggcctgcaagtgggagaagtgggcgctcagttcagcagcagattccacgccaagacaggcagccctggcatcagatgtagcgtcgtgaccaaagagaagctgcaggacaatcggttcttcaagaatctgcagagagagggcagactgaccctggacaaaatcgccgtgctgaaagagggcgatctgtacccagacaaaggcggcgagaagttcatcagcctgagcaaggatcggaagtgcgtgaccacacacgccgacatcaacgccgctcagaacctgcagaagcggttctggacaagaacccacggcttctacaaggtgtactgcaaggcctaccaggtggacggccagaccgtgtacatccctgagagcaaggaccagaagcagaagatcatcgaagagttcggcgagggctacttcattctgaaggacggggtgtacgaatgggtcaacgccggcaagctgaaaatcaagaagggcagctccaagcagagcagcagcgagctggtggatagcgacatcctgaaagacagcttcgacctggcctccgagctgaaaggcgaaaagctgatgctgtacagggaccccagcggcaatgtgttccccagcgacaaatggatggccgctggcgtgttcttcggaaagctggaacgcatcctgatcagcaagctgaccaaccagtactccatcagcaccatcgaggacgacagcagcaagcagtctatgaaaaggccggcggccacgaaaaaggccggccaggcaaaaaagaaaaagggatcctacccatacgatgttccagattacgcttatccctacgacgtgcctgattatgcatacccatatgatgtccccgactatgcctaa

SEQ ID NO: 6 - protein, 1361 aa, synthetic construct
  REGION 1..1361: note = Description of artificial sequence: BhCas12b GGSGGS-ABE8-Xten20 at P153 polypeptide sequence
MAPKKKRKVGIHGVPAAATRSFILKIEPNEEVKKGLWKTHEVLNHGIAYYMNILKLIRQEAIYEHHEQDPKNPKKVSKAEIQAELWDFVLKMQKCNSFTHEVDKDEVFNILRELYEELVPSSVEKKGEANQLSNKFLYPLVDPNSQSGKGTASSGRKPRWYNLKIAGDPGGSGGSSEVEFSHEYWMRHALTLAKRARDEREVPVGAVLVLNNRVIGEGWNRAIGLHDPTAHAEIMALRQGGLVMQNYRLYDATLYVTFEPCVMCAGAMIHSRIGRVVFGVRNAKTGAAGSLMDVLHHPGMNHRVEITEGILADECAALLCRFFRMPRRVFNAQKKAQSSTDGSSGSETPGTSESATPESSGSWEEEKKKWEEDKKKDPLAKILGKLAEYGLIPLFIPYTDSNEPIVKEIKWMEKSRNQSVRRLDKDMFIQALERFLSWESWNLKVKEEYEKVEKEYKTLEERIKEDIQALKALEQYEKERQEQLLRDTLNTNEYRLSKRGLRGWREIIQKWLKMDENEPSEKYLEVFKDYQRKHPREAGDYSVYEFLSKKENHFIWRNHPEYPYLYATFCEIDKKKKDAKQQATFTLADPINHPLWVRFEERSGSNLNKYRILTEQLHTEKLKKKLTVQLDRLIYPTESGGWEEKGKVDIVLLPSRQFYNQIFLDIEEKGKHAFTYKDESIKFPLKGTLGGARVQFDRDHLRRYPHKVESGNVGRIYFNMTVNIEPTESPVSKSLKIHRDDFPKVVNFKPKELTEWIKDSKGKKLKSGIESLEIGLRVMSIDLGQRQAAAASIFEVVDQKPDIEGKLFFPIKGTELYAVHRASFNIKLPGETLVKSREVLRKAREDNLKLMNQKLNFLRNVLHFQQFEDITEREKRVTKWISRQENSDVPLVYQDELIQIRELMYKPYKDWVAFLKQLHKRLEVEIGKEVKHWRKSLSDGRKGLYGISLKNIDEIDRTRKFLLRWSLRPTEPGEVRRLEPGQRFAIDQLNHLNALKEDRLKKMANTIIMHALGYCYDVRKKKWQAKNPACQIILFEDLSNYNPYEERSRFENSKLMKWSRREIPRQVALQGEIYGLQVGEVGAQFSSRFHAKTGSPGIRCSVVTKEKLQDNRFFKNLQREGRLTLDKIAVLKEGDLYPDKGGEKFISLSKDRKCVTTHADINAAQNLQKRFWTRTHGFYKVYCKAYQVDGQTVYIPESKDQKQKIIEEFGEGYFILKDGVYEWVNAGKLKIKKGSSKQSSSELVDSDILKDSFDLASELKGEKLMLYRDPSGNVFPSDKWMAAGVFFGKLERILISKLTNQYSISTIEDDSSKQSMKRPAATKKAGQAKKKKGSYPYDVPDYAYPYDVPDYAYPYDVPDYA

SEQ ID NO: 7 - DNA, 4092 bp, synthetic construct
  misc_feature 1..4092: note = Description of artificial sequence: BhCas12b GGSGGS-ABE8-Xten20 at K255 polynucleotide sequence
  misc_feature 1..6: note = Kozak sequence
  misc_feature 7..57: note = Sequence encoding N-terminal nuclear localization signal (NLS)
  misc_feature 58..822: note = Sequence encoding BhCas12b
  misc_feature 823..840: note = Sequence encoding a linker
  misc_feature 841..1338: note = Sequence encoding TadA*8
  misc_feature 1339..1398: note = Sequence encoding Xten20 linker
  misc_feature 1399..3954: note = Sequence encoding BhCas12b
  misc_feature 3955..4002: note = Sequence encoding C-terminal NLS
  misc_feature 4003..4008: note = Sequence encoding a GS linker
  misc_feature 4009..4089: note = Sequence encoding 3x hemagglutinin (HA) tag
  source 1..4092: mol_type = other DNA
gccaccatggccccaaagaagaagcggaaggtcggtatccacggagtcccagcagccgccaccagatccttcatcctgaagatcgagcccaacgaggaagtgaagaaaggcctctggaaaacccacgaggtgctgaaccacggaatcgcctactacatgaatatcctgaagctgatccggcaagaggccatctacgagcaccacgagcaggaccccaagaatcccaagaaggtgtccaaggccgagatccaggccgagctgtgggatttcgtgctgaagatgcagaagtgcaacagcttcacacacgaggtggacaaggacgaggtgttcaacatcctgagagagctgtacgaggaactggtgcccagcagcgtggaaaagaagggcgaagccaaccagctgagcaacaagtttctgtaccctctggtggaccccaacagccagtctggaaagggaacagccagcagcggcagaaagcccagatggtacaacctgaagattgccggcgatccctcctgggaagaagagaagaagaagtgggaagaagataagaaaaaggacccgctggccaagatcctgggcaagctggctgagtacggactgatccctctgttcatcccctacaccgacagcaacgagcccatcgtgaaagaaatcaagtggatggaaaagtcccggaaccagagcgtgcggcggctggataaggacatgttcattcaggccctggaacggttcctgagctgggagagctggaacctgaaagtgaaagaggaatacgagaaggtcgagaaagagtacaagaccctggaagagaggatcaaaggaggctctggaggaagctccgaagtcgagttttcccatgagtactggatgagacacgcattgactctcgcaaagagggctcgagatgaacgcgaggtgcccgtgggggcagtactcgtgctcaacaatcgcgtaatcggcgaaggttggaatagggcaatcggactccacgaccccactgcacatgcggaaatcatggcccttcgacagggagggcttgtgatgcagaattatcgactttatgatgcgacgctgtacgtcacgtttgaaccttgcgtaatgtgcgcgggagctatgattcactcccgcattggacgagttgtattcggtgttcgcaacgccaagacgggtgccgcaggttcactgatggacgtgctgcatcatccaggcatgaaccaccgggtagaaatcacagaaggcatattggcggacgaatgtgcggcgctgttgtgtcgtttttttcgcatgcccaggcgggtctttaacgcccagaaaaaagcacaatcctctactgacggctcttctggatctgaaacacctggcacaagcgagagcgccacccctgagagctctggcgaggacatccaggctctgaaggctctggaacagtatgagaaagagcggcaagaacagctgctgcgggacaccctgaacaccaacgagtaccggctgagcaagagaggccttagaggctggcgggaaatcatccagaaatggctgaaaatggacgagaacgagccctccgagaagtacctggaagtgttcaaggactaccagcggaagcaccctagagaggccggcgattacagcgtgtacgagttcctgtccaagaaagagaaccacttcatctggcggaatcaccctgagtacccctacctgtacgccaccttctgcgagatcgacaagaaaaagaaggacgccaagcagcaggccaccttcacactggccgatcctatcaatcaccctctgtgggtccgattcgaggaaagaagcggcagcaacctgaacaagtacagaatcctgaccgagcagctgcacaccgagaagctgaagaaaaagctgacagtgcagctggaccggctgatctaccctacagaatctggcggctgggaagagaagggcaaagtggacattgtgctgctgcccagccggcagttctacaaccagatcttcctggacatcgaggaaaagggcaagcacgccttcacctacaaggatgagagcatcaagttccctctgaagggcacactcggcggagccagagtgcagttcgacagagatcacctgagaagataccctcacaaggtggaaagcggcaacgtgggcagaatctacttcaacatgaccgtgaacatcgagcctacagagtccccagtgtccaagtctctgaagatccaccgggacgacttccccaaggtggtcaacttcaagcccaaagaactgaccgagtggatcaaggacagcaagggcaagaaactgaagtccggcatcgagtccctggaaatcggcctgagagtgatgagcatcgacctgggacagagacaggccgctgccgcctctattttcgaggtggtggatcagaagcccgacatcgaaggcaagctgtttttcccaatcaagggcaccgagctgtatgccgtgcacagagccagcttcaacatcaagctgcccggcgagacactggtcaagagcagagaagtgctgcggaaggccagagaggacaatctgaaactgatgaaccagaagctcaacttcctgcggaacgtgctgcacttccagcagttcgaggacatcaccgagagagagaagcgggtcaccaagtggatcagcagacaagagaacagcgacgtgcccctggtgtaccaggatgagctgatccagatccgcgagctgatgtacaagccttacaaggactgggtcgccttcctgaagcagctccacaagagactggaagtcgagatcggcaaagaagtgaagcactggcggaagtccctgagcgacggaagaaagggcctgtacggcatctccctgaagaacatcgacgagatcgatcggacccggaagttcctgctgagatggtccctgaggcctaccgaacctggcgaagtgcgtagactggaacccggccagagattcgccatcgaccagctgaatcacctgaacgccctgaaagaagatcggctgaagaagatggccaacaccatcatcatgcacgccctgggctactgctacgacgtgcggaagaagaaatggcaggctaagaaccccgcctgccagatcatcctgttcgaggatctgagcaactacaacccctacgaggaaaggtcccgcttcgagaacagcaagctcatgaagtggtccagacgcgagatccccagacaggttgcactgcagggcgagatctatggcctgcaagtgggagaagtgggcgctcagttcagcagcagattccacgccaagacaggcagccctggcatcagatgtagcgtcgtgaccaaagagaagctgcaggacaatcggttcttcaagaatctgcagagagagggcagactgaccctggacaaaatcgccgtgctgaaagagggcgatctgtacccagacaaaggcggcgagaagttcatcagcctgagcaaggatcggaagtgcgtgaccacacacgccgacatcaacgccgctcagaacctgcagaagcggttctggacaagaacccacggcttctacaaggtgtactgcaaggcctaccaggtggacggccagaccgtgtacatccctgagagcaaggaccagaagcagaagatcatcgaagagttcggcgagggctacttcattctgaaggacggggtgtacgaatgggtcaacgccggcaagctgaaaatcaagaagggcagctccaagcagagcagcagcgagctggtggatagcgacatcctgaaagacagcttcgacctggcctccgagctgaaaggcgaaaagctgatgctgtacagggaccccagcggcaatgtgttccccagcgacaaatggatggccgctggcgtgttcttcggaaagctggaacgcatcctgatcagcaagctgaccaaccagtactccatcagcaccatcgaggacgacagcagcaagcagtctatgaaaaggccggcggccacgaaaaaggccggccaggcaaaaaagaaaaagggatcctacccatacgatgttccagattacgcttatccctacgacgtgcctgattatgcatacccatatgatgtccccgactatgcctaa

SEQ ID NO: 8 - protein, 1361 aa, synthetic construct
  REGION 1..1361: note = Description of artificial sequence: BhCas12b GGSGGS-ABE8-Xten20 at K255 polypeptide sequence
MAPKKKRKVGIHGVPAAATRSFILKIEPNEEVKKGLWKTHEVLNHGIAYYMNILKLIRQEAIYEHHEQDPKNPKKVSKAEIQAELWDFVLKMQKCNSFTHEVDKDEVFNILRELYEELVPSSVEKKGEANQLSNKFLYPLVDPNSQSGKGTASSGRKPRWYNLKIAGDPSWEEEKKKWEEDKKKDPLAKILGKLAEYGLIPLFIPYTDSNEPIVKEIKWMEKSRNQSVRRLDKDMFIQALERFLSWESWNLKVKEEYEKVEKEYKTLEERIKGGSGGSSEVEFSHEYWMRHALTLAKRARDEREVPVGAVLVLNNRVIGEGWNRAIGLHDPTAHAEIMALRQGGLVMQNYRLYDATLYVTFEPCVMCAGAMIHSRIGRVVFGVRNAKTGAAGSLMDVLHHPGMNHRVEITEGILADECAALLCRFFRMPRRVFNAQKKAQSSTDGSSGSETPGTSESATPESSGEDIQALKALEQYEKERQEQLLRDTLNTNEYRLSKRGLRGWREIIQKWLKMDENEPSEKYLEVFKDYQRKHPREAGDYSVYEFLSKKENHFIWRNHPEYPYLYATFCEIDKKKKDAKQQATFTLADPINHPLWVRFEERSGSNLNKYRILTEQLHTEKLKKKLTVQLDRLIYPTESGGWEEKGKVDIVLLPSRQFYNQIFLDIEEKGKHAFTYKDESIKFPLKGTLGGARVQFDRDHLRRYPHKVESGNVGRIYFNMTVNIEPTESPVSKSLKIHRDDFPKVVNFKPKELTEWIKDSKGKKLKSGIESLEIGLRVMSIDLGQRQAAAASIFEVVDQKPDIEGKLFFPIKGTELYAVHRASFNIKLPGETLVKSREVLRKAREDNLKLMNQKLNFLRNVLHFQQFEDITEREKRVTKWISRQENSDVPLVYQDELIQIRELMYKPYKDWVAFLKQLHKRLEVEIGKEVKHWRKSLSDGRKGLYGISLKNIDEIDRTRKFLLRWSLRPTEPGEVRRLEPGQRFAIDQLNHLNALKEDRLKKMANTIIMHALGYCYDVRKKKWQAKNPACQIILFEDLSNYNPYEERSRFENSKLMKWSRREIPRQVALQGEIYGLQVGEVGAQFSSRFHAKTGSPGIRCSVVTKEKLQDNRFFKNLQREGRLTLDKIAVLKEGDLYPDKGGEKFISLSKDRKCVTTHADINAAQNLQKRFWTRTHGFYKVYCKAYQVDGQTVYIPESKDQKQKIIEEFGEGYFILKDGVYEWVNAGKLKIKKGSSKQSSSELVDSDILKDSFDLASELKGEKLMLYRDPSGNVFPSDKWMAAGVFFGKLERILISKLTNQYSISTIEDDSSKQSMKRPAATKKAGQAKKKKGSYPYDVPDYAYPYDVPDYAYPYDVPDYA

SEQ ID NO: 9 - DNA, 4092 bp, synthetic construct
  misc_feature 1..4092: note = Description of artificial sequence: BhCas12b GGSGGS-ABE8-Xten20 at D306 polynucleotide sequence
  misc_feature 1..6: note = Kozak sequence
  misc_feature 7..57: note = Sequence encoding N-terminal nuclear localization signal (NLS)
  misc_feature 58..975: note = Sequence encoding BhCas12b
  misc_feature 976..993: note = Sequence encoding a linker
  misc_feature 994..1491: note = Sequence encoding TadA*8
  misc_feature 1492..1551: note = Sequence encoding Xten20 linker
  misc_feature 1552..3954: note = Sequence encoding BhCas12b
  misc_feature 3955..4002: note = Sequence encoding C-terminal NLS
  misc_feature 4003..4008: note = Sequence encoding a GS linker
  misc_feature 4009..4089: note = Sequence encoding 3x hemagglutinin (HA) tag
  source 1..4092: mol_type = other DNA
gccaccatggccccaaagaagaagcggaaggtcggtatccacggagtcccagcagccgccaccagatccttcatcctgaagatcgagcccaacgaggaagtgaagaaaggcctctggaaaacccacgaggtgctgaaccacggaatcgcctactacatgaatatcctgaagctgatccggcaagaggccatctacgagcaccacgagcaggaccccaagaatcccaagaaggtgtccaaggccgagatccaggccgagctgtgggatttcgtgctgaagatgcagaagtgcaacagcttcacacacgaggtggacaaggacgaggtgttcaacatcctgagagagctgtacgaggaactggtgcccagcagcgtggaaaagaagggcgaagccaaccagctgagcaacaagtttctgtaccctctggtggaccccaacagccagtctggaaagggaacagccagcagcggcagaaagcccagatggtacaacctgaagattgccggcgatccctcctgggaagaagagaagaagaagtgggaagaagataagaaaaaggacccgctggccaagatcctgggcaagctggctgagtacggactgatccctctgttcatcccctacaccgacagcaacgagcccatcgtgaaagaaatcaagtggatggaaaagtcccggaaccagagcgtgcggcggctggataaggacatgttcattcaggccctggaacggttcctgagctgggagagctggaacctgaaagtgaaagaggaatacgagaaggtcgagaaagagtacaagaccctggaagagaggatcaaagaggacatccaggctctgaaggctctggaacagtatgagaaagagcggcaagaacagctgctgcgggacaccctgaacaccaacgagtaccggctgagcaagagaggccttagaggctggcgggaaatcatccagaaatggctgaaaatggacggaggctctggaggaagctccgaagtcgagttttcccatgagtactggatgagacacgcattgactctcgcaaagagggctcgagatgaacgcgaggtgcccgtgggggcagtactcgtgctcaacaatcgcgtaatcggcgaaggttggaatagggcaatcggactccacgaccccactgcacatgcggaaatcatggcccttcgacagggagggcttgtgatgcagaattatcgactttatgatgcgacgctgtacgtcacgtttgaaccttgcgtaatgtgcgcgggagctatgattcactcccgcattggacgagttgtattcggtgttcgcaacgccaagacgggtgccgcaggttcactgatggacgtgctgcatcatccaggcatgaaccaccgggtagaaatcacagaaggcatattggcggacgaatgtgcggcgctgttgtgtcgtttttttcgcatgcccaggcgggtctttaacgcccagaaaaaagcacaatcctctactgacggctcttctggatctgaaacacctggcacaagcgagagcgccacccctgagagctctggcgagaacgagccctccgagaagtacctggaagtgttcaaggactaccagcggaagcaccctagagaggccggcgattacagcgtgtacgagttcctgtccaagaaagagaaccacttcatctggcggaatcaccctgagtacccctacctgtacgccaccttctgcgagatcgacaagaaaaagaaggacgccaagcagcaggccaccttcacactggccgatcctatcaatcaccctctgtgggtccgattcgaggaaagaagcggcagcaacctgaacaagtacagaatcctgaccgagcagctgcacaccgagaagctgaagaaaaagctgacagtgcagctggaccggctgatctaccctacagaatctggcggctgggaagagaagggcaaagtggacattgtgctgctgcccagccggcagttctacaaccagatcttcctggacatcgaggaaaagggcaagcacgccttcacctacaaggatgagagcatcaagttccctctgaagggcacactcggcggagccagagtgcagttcgacagagatcacctgagaagataccctcacaaggtggaaagcggcaacgtgggcagaatctacttcaacatgaccgtgaacatcgagcctacagagtccccagtgtccaagtctctgaagatccaccgggacgacttccccaaggtggtcaacttcaagcccaaagaactgaccgagtggatcaaggacagcaagggcaagaaactgaagtccggcatcgagtccctggaaatcggcctgagagtgatgagcatcgacctgggacagagacaggccgctgccgcctctattttcgaggtggtggatcagaagcccgacatcgaaggcaagctgtttttcccaatcaagggcaccgagctgtatgccgtgcacagagccagcttcaacatcaagctgcccggcgagacactggtcaagagcagagaagtgctgcggaaggccagagaggacaatctgaaactgatgaaccagaagctcaacttcctgcggaacgtgctgcacttccagcagttcgaggacatcaccgagagagagaagcgggtcaccaagtggatcagcagacaagagaacagcgacgtgcccctggtgtaccaggatgagctgatccagatccgcgagctgatgtacaagccttacaaggactgggtcgccttcctgaagcagctccacaagagactggaagtcgagatcggcaaagaagtgaagcactggcggaagtccctgagcgacggaagaaagggcctgtacggcatctccctgaagaacatcgacgagatcgatcggacccggaagttcctgctgagatggtccctgaggcctaccgaacctggcgaagtgcgtagactggaacccggccagagattcgccatcgaccagctgaatcacctgaacgccctgaaagaagatcggctgaagaagatggccaacaccatcatcatgcacgccctgggctactgctacgacgtgcggaagaagaaatggcaggctaagaaccccgcctgccagatcatcctgttcgaggatctgagcaactacaacccctacgaggaaaggtcccgcttcgagaacagcaagctcatgaagtggtccagacgcgagatccccagacaggttgcactgcagggcgagatctatggcctgcaagtgggagaagtgggcgctcagttcagcagcagattccacgccaagacaggcagccctggcatcagatgtagcgtcgtgaccaaagagaagctgcaggacaatcggttcttcaagaatctgcagagagagggcagactgaccctggacaaaatcgccgtgctgaaagagggcgatctgtacccagacaaaggcggcgagaagttcatcagcctgagcaaggatcggaagtgcgtgaccacacacgccgacatcaacgccgctcagaacctgcagaagcggttctggacaagaacccacggcttctacaaggtgtactgcaaggcctaccaggtggacggccagaccgtgtacatccctgagagcaaggaccagaagcagaagatcatcgaagagttcggcgagggctacttcattctgaaggacggggtgtacgaatgggtcaacgccggcaagctgaaaatcaagaagggcagctccaagcagagcagcagcgagctggtggatagcgacatcctgaaagacagcttcgacctggcctccgagctgaaaggcgaaaagctgatgctgtacagggaccccagcggcaatgtgttccccagcgacaaatggatggccgctggcgtgttcttcggaaagctggaacgcatcctgatcagcaagctgaccaaccagtactccatcagcaccatcgaggacgacagcagcaagcagtctatgaaaaggccggcggccacgaaaaaggccggccaggcaaaaaagaaaaagggatcctacccatacgatgttccagattacgcttatccctacgacgtgcctgattatgcatacccatatgatgtccccgactatgcctaa

SEQ ID NO: 10 - protein, 1361 aa, synthetic construct
  REGION 1..1361: note = Description of artificial sequence: BhCas12b GGSGGS-ABE8-Xten20 at D306 polypeptide sequence
MAPKKKRKVGIHGVPAAATRSFILKIEPNEEVKKGLWKTHEVLNHGIAYYMNILKLIRQEAIYEHHEQDPKNPKKVSKAEIQAELWDFVLKMQKCNSFTHEVDKDEVFNILRELYEELVPSSVEKKGEANQLSNKFLYPLVDPNSQSGKGTASSGRKPRWYNLKIAGDPSWEEEKKKWEEDKKKDPLAKILGKLAEYGLIPLFIPYTDSNEPIVKEIKWMEKSRNQSVRRLDKDMFIQALERFLSWESWNLKVKEEYEKVEKEYKTLEERIKEDIQALKALEQYEKERQEQLLRDTLNTNEYRLSKRGLRGWREIIQKWLKMDGGSGGSSEVEFSHEYWMRHALTLAKRARDEREVPVGAVLVLNNRVIGEGWNRAIGLHDPTAHAEIMALRQGGLVMQNYRLYDATLYVTFEPCVMCAGAMIHSRIGRVVFGVRNAKTGAAGSLMDVLHHPGMNHRVEITEGILADECAALLCRFFRMPRRVFNAQKKAQSSTDGSSGSETPGTSESATPESSGENEPSEKYLEVFKDYQRKHPREAGDYSVYEFLSKKENHFIWRNHPEYPYLYATFCEIDKKKKDAKQQATFTLADPINHPLWVRFEERSGSNLNKYRILTEQLHTEKLKKKLTVQLDRLIYPTESGGWEEKGKVDIVLLPSRQFYNQIFLDIEEKGKHAFTYKDESIKFPLKGTLGGARVQFDRDHLRRYPHKVESGNVGRIYFNMTVNIEPTESPVSKSLKIHRDDFPKVVNFKPKELTEWIKDSKGKKLKSGIESLEIGLRVMSIDLGQRQAAAASIFEVVDQKPDIEGKLFFPIKGTELYAVHRASFNIKLPGETLVKSREVLRKAREDNLKLMNQKLNFLRNVLHFQQFEDITEREKRVTKWISRQENSDVPLVYQDELIQIRELMYKPYKDWVAFLKQLHKRLEVEIGKEVKHWRKSLSDGRKGLYGISLKNIDEIDRTRKFLLRWSLRPTEPGEVRRLEPGQRFAIDQLNHLNALKEDRLKKMANTIIMHALGYCYDVRKKKWQAKNPACQIILFEDLSNYNPYEERSRFENSKLMKWSRREIPRQVALQGEIYGLQVGEVGAQFSSRFHAKTGSPGIRCSVVTKEKLQDNRFFKNLQREGRLTLDKIAVLKEGDLYPDKGGEKFISLSKDRKCVTTHADINAAQNLQKRFWTRTHGFYKVYCKAYQVDGQTVYIPESKDQKQKIIEEFGEGYFILKDGVYEWVNAGKLKIKKGSSKQSSSELVDSDILKDSFDLASELKGEKLMLYRDPSGNVFPSDKWMAAGVFFGKLERILISKLTNQYSISTIEDDSSKQSMKRPAATKKAGQAKKKKGSYPYDVPDYAYPYDVPDYAYPYDVPDYA

SEQ ID NO: 11 - DNA, 4092 bp, synthetic construct
  misc_feature 1..4092: note = Description of artificial sequence: BhCas12b GGSGGS-ABE8-Xten20 at D980 polynucleotide sequence
  misc_feature 1..6: note = Kozak sequence
  misc_feature 7..57: note = Sequence encoding N-terminal nuclear localization signal (NLS)
  misc_feature 58..2997: note = Sequence encoding BhCas12b
  misc_feature 2998..3015: note = Sequence encoding a linker
  misc_feature 3016..3513: note = Sequence encoding TadA*8
  misc_feature 3514..3573: note = Sequence encoding Xten20 linker
  misc_feature 3574..3954: note = Sequence encoding BhCas12b
  misc_feature 3955..4002: note = Sequence encoding C-terminal NLS
  misc_feature 4003..4008: note = Sequence encoding a GS linker
  misc_feature 4009..4089: note = Sequence encoding 3x hemagglutinin (HA) tag
  source 1..4092: mol_type = other DNA
gccaccatggccccaaagaagaagcggaaggtcggtatccacggagtcccagcagccgccaccagatccttcatcctgaagatcgagcccaacgaggaagtgaagaaaggcctctggaaaacccacgaggtgctgaaccacggaatcgcctactacatgaatatcctgaagctgatccggcaagaggccatctacgagcaccacgagcaggaccccaagaatcccaagaaggtgtccaaggccgagatccaggccgagctgtgggatttcgtgctgaagatgcagaagtgcaacagcttcacacacgaggtggacaaggacgaggtgttcaacatcctgagagagctgtacgaggaactggtgcccagcagcgtggaaaagaagggcgaagccaaccagctgagcaacaagtttctgtaccctctggtggaccccaacagccagtctggaaagggaacagccagcagcggcagaaagcccagatggtacaacctgaagattgccggcgatccctcctgggaagaagagaagaagaagtgggaagaagataagaaaaaggacccgctggccaagatcctgggcaagctggctgagtacggactgatccctctgttcatcccctacaccgacagcaacgagcccatcgtgaaagaaatcaagtggatggaaaagtcccggaaccagagcgtgcggcggctggataaggacatgttcattcaggccctggaacggttcctgagctgggagagctggaacctgaaagtgaaagaggaatacgagaaggtcgagaaagagtacaagaccctggaagagaggatcaaagaggacatccaggctctgaaggctctggaacagtatgagaaagagcggcaagaacagctgctgcgggacaccctgaacaccaacgagtaccggctgagcaagagaggccttagaggctggcgggaaatcatccagaaatggctgaaaatggacgagaacgagccctccgagaagtacctggaagtgttcaaggactaccagcggaagcaccctagagaggccggcgattacagcgtgtacgagttcctgtccaagaaagagaaccacttcatctggcggaatcaccctgagtacccctacctgtacgccaccttctgcgagatcgacaagaaaaagaaggacgccaagcagcaggccaccttcacactggccgatcctatcaatcaccctctgtgggtccgattcgaggaaagaagcggcagcaacctgaacaagtacagaatcctgaccgagcagctgcacaccgagaagctgaagaaaaagctgacagtgcagctggaccggctgatctaccctacagaatctggcggctgggaagagaagggcaaagtggacattgtgctgctgcccagccggcagttctacaaccagatcttcctggacatcgaggaaaagggcaagcacgccttcacctacaaggatgagagcatcaagttccctctgaagggcacactcggcggagccagagtgcagttcgacagagatcacctgagaagataccctcacaaggtggaaagcggcaacgtgggcagaatctacttcaacatgaccgtgaacatcgagcctacagagtccccagtgtccaagtctctgaagatccaccgggacgacttccccaaggtggtcaacttcaagcccaaagaactgaccgagtggatcaaggacagcaagggcaagaaactgaagtccggcatcgagtccctggaaatcggcctgagagtgatgagcatcgacctgggacagagacaggccgctgccgcctctattttcgaggtggtggatcagaagcccgacatcgaaggcaagctgtttttcccaatcaagggcaccgagctgtatgccgtgcacagagccagcttcaacatcaagctgcccggcgagacactggtcaagagcagagaagtgctgcggaaggccagagaggacaatctgaaactgatgaaccagaagctcaacttcctgcggaacgtgctgcacttccagcagttcgaggacatcaccgagagagagaagcgggtcaccaagtggatcagcagacaagagaacagcgacgtgcccctggtgtaccaggatgagctgatccagatccgcgagctgatgtacaagccttacaaggactgggtcgccttcctgaagcagctccacaagagactggaagtcgagatcggcaaagaagtgaagcactggcggaagtccctgagcgacggaagaaagggcctgtacggcatctccctgaagaacatcgacgagatcgatcggacccggaagttcctgctgagatggtccctgaggcctaccgaacctggcgaagtgcgtagactggaacccggccagagattcgccatcgaccagctgaatcacctgaacgccctgaaagaagatcggctgaagaagatggccaacaccatcatcatgcacgccctgggctactgctacgacgtgcggaagaagaaatggcaggctaagaaccccgcctgccagatcatcctgttcgaggatctgagcaactacaacccctacgaggaaaggtcccgcttcgagaacagcaagctcatgaagtggtccagacgcgagatccccagacaggttgcactgcagggcgagatctatggcctgcaagtgggagaagtgggcgctcagttcagcagcagattccacgccaagacaggcagccctggcatcagatgtagcgtcgtgaccaaagagaagctgcaggacaatcggttcttcaagaatctgcagagagagggcagactgaccctggacaaaatcgccgtgctgaaagagggcgatctgtacccagacaaaggcggcgagaagttcatcagcctgagcaaggatcggaagtgcgtgaccacacacgccgacatcaacgccgctcagaacctgcagaagcggttctggacaagaacccacggcttctacaaggtgtactgcaaggcctaccaggtggacggaggctctggaggaagctccgaagtcgagttttcccatgagtactggatgagacacgcattgactctcgcaaagagggctcgagatgaacgcgaggtgcccgtgggggcagtactcgtgctcaacaatcgcgtaatcggcgaaggttggaatagggcaatcggactccacgaccccactgcacatgcggaaatcatggcccttcgacagggagggcttgtgatgcagaattatcgactttatgatgcgacgctgtacgtcacgtttgaaccttgcgtaatgtgcgcgggagctatgattcactcccgcattggacgagttgtattcggtgttcgcaacgccaagacgggtgccgcaggttcactgatggacgtgctgcatcatccaggcatgaaccaccgggtagaaatcacagaaggcatattggcggacgaatgtgcggcgctgttgtgtcgtttttttcgcatgcccaggcgggtctttaacgcccagaaaaaagcacaatcctctactgacggctcttctggatctgaaacacctggcacaagcgagagcgccacccctgagagctctggcggccagaccgtgtacatccctgagagcaaggaccagaagcagaagatcatcgaagagttcggcgagggctacttcattctgaaggacggggtgtacgaatgggtcaacgccggcaagctgaaaatcaagaagggcagctccaagcagagcagcagcgagctggtggatagcgacatcctgaaagacagcttcgacctggcctccgagctgaaaggcgaaaagctgatgctgtacagggaccccagcggcaatgtgttccccagcgacaaatggatggccgctggcgtgttcttcggaaagctggaacgcatcctgatcagcaagctgaccaaccagtactccatcagcaccatcgaggacgacagcagcaagcagtctatgaaaaggccggcggccacgaaaaaggccggccaggcaaaaaagaaaaagggatcctacccatacgatgttccagattacgcttatccctacgacgtgcctgattatgcatacccatatgatgtccccgactatgcctaa

SEQ ID NO: 12 - protein, 1361 aa, synthetic construct
  REGION 1..1361: note = Description of artificial sequence: BhCas12b GGSGGS-ABE8-Xten20 at D980 polypeptide sequence
MAPKKKRKVGIHGVPAAATRSFILKIEPNEEVKKGLWKTHEVLNHGIAYYMNILKLIRQEAIYEHHEQDPKNPKKVSKAEIQAELWDFVLKMQKCNSFTHEVDKDEVFNILRELYEELVPSSVEKKGEANQLSNKFLYPLVDPNSQSGKGTASSGRKPRWYNLKIAGDPSWEEEKKKWEEDKKKDPLAKILGKLAEYGLIPLFIPYTDSNEPIVKEIKWMEKSRNQSVRRLDKDMFIQALERFLSWESWNLKVKEEYEKVEKEYKTLEERIKEDIQALKALEQYEKERQEQLLRDTLNTNEYRLSKRGLRGWREIIQKWLKMDENEPSEKYLEVFKDYQRKHPREAGDYSVYEFLSKKENHFIWRNHPEYPYLYATFCEIDKKKKDAKQQATFTLADPINHPLWVRFEERSGSNLNKYRILTEQLHTEKLKKKLTVQLDRLIYPTESGGWEEKGKVDIVLLPSRQFYNQIFLDIEEKGKHAFTYKDESIKFPLKGTLGGARVQFDRDHLRRYPHKVESGNVGRIYFNMTVNIEPTESPVSKSLKIHRDDFPKVVNFKPKELTEWIKDSKGKKLKSGIESLEIGLRVMSIDLGQRQAAAASIFEVVDQKPDIEGKLFFPIKGTELYAVHRASFNIKLPGETLVKSREVLRKAREDNLKLMNQKLNFLRNVLHFQQFEDITEREKRVTKWISRQENSDVPLVYQDELIQIRELMYKPYKDWVAFLKQLHKRLEVEIGKEVKHWRKSLSDGRKGLYGISLKNIDEIDRTRKFLLRWSLRPTEPGEVRRLEPGQRFAIDQLNHLNALKEDRLKKMANTIIMHALGYCYDVRKKKWQAKNPACQIILFEDLSNYNPYEERSRFENSKLMKWSRREIPRQVALQGEIYGLQVGEVGAQFSSRFHAKTGSPGIRCSVVTKEKLQDNRFFKNLQREGRLTLDKIAVLKEGDLYPDKGGEKFISLSKDRKCVTTHADINAAQNLQKRFWTRTHGFYKVYCKAYQVDGGSGGSSEVEFSHEYWMRHALTLAKRARDEREVPVGAVLVLNNRVIGEGWNRAIGLHDPTAHAEIMALRQGGLVMQNYRLYDATLYVTFEPCVMCAGAMIHSRIGRVVFGVRNAKTGAAGSLMDVLHHPGMNHRVEITEGILADECAALLCRFFRMPRRVFNAQKKAQSSTDGSSGSETPGTSESATPESSGGQTVYIPESKDQKQKIIEEFGEGYFILKDGVYEWVNAGKLKIKKGSSKQSSSELVDSDILKDSFDLASELKGEKLMLYRDPSGNVFPSDKWMAAGVFFGKLERILISKLTNQYSISTIEDDSSKQSMKRPAATKKAGQAKKKKGSYPYDVPDYAYPYDVPDYAYPYDVPDYA

SEQ ID NO: 13 - DNA, 4092 bp, synthetic construct
  misc_feature 1..4092: note = Description of artificial sequence: BhCas12b GGSGGS-ABE8-Xten20 at K1019 polynucleotide sequence
  misc_feature 1..6: note = Kozak sequence
  misc_feature 7..57: note = Sequence encoding N-terminal nuclear localization signal (NLS)
  misc_feature 58..3114: note = Sequence encoding BhCas12b
  misc_feature 3115..3132: note = Sequence encoding a linker
  misc_feature 3133..3630: note = Sequence encoding TadA*8
  misc_feature 3631..3690: note = Sequence encoding Xten20 linker
  misc_feature 3691..3954: note = Sequence encoding BhCas12b
  misc_feature 3955..4002: note = Sequence encoding C-terminal NLS
  misc_feature 4003..4008: note = Sequence encoding GS linker
  misc_feature 4009..4089: note = Sequence encoding 3x hemagglutinin (HA) tag
  source 1..4092: mol_type = other DNA
gccaccatggccccaaagaagaagcggaaggtcggtatccacggagtcccagcagccgccaccagatccttcatcctgaagatcgagcccaacgaggaagtgaagaaaggcctctggaaaacccacgaggtgctgaaccacggaatcgcctactacatgaatatcctgaagctgatccggcaagaggccatctacgagcaccacgagcaggaccccaagaatcccaagaaggtgtccaaggccgagatccaggccgagctgtgggatttcgtgctgaagatgcagaagtgcaacagcttcacacacgaggtggacaaggacgaggtgttcaacatcctgagagagctgtacgaggaactggtgcccagcagcgtggaaaagaagggcgaagccaaccagctgagcaacaagtttctgtaccctctggtggaccccaacagccagtctggaaagggaacagccagcagcggcagaaagcccagatggtacaacctgaagattgccggcgatccctcctgggaagaagagaagaagaagtgggaagaagataagaaaaaggacccgctggccaagatcctgggcaagctggctgagtacggactgatccctctgttcatcccctacaccgacagcaacgagcccatcgtgaaagaaatcaagtggatggaaaagtcccggaaccagagcgtgcggcggctggataaggacatgttcattcaggccctggaacggttcctgagctgggagagctggaacctgaaagtgaaagaggaatacgagaaggtcgagaaagagtacaagaccctggaagagaggatcaaagaggacatccaggctctgaaggctctggaacagtatgagaaagagcggcaagaacagctgctgcgggacaccctgaacaccaacgagtaccggctgagcaagagaggccttagaggctggcgggaaatcatccagaaatggctgaaaatggacgagaacgagccctccgagaagtacctggaagtgttcaaggactaccagcggaagcaccctagagaggccggcgattacagcgtgtacgagttcctgtccaagaaagagaaccacttcatctggcggaatcaccctgagtacccctacctgtacgccaccttctgcgagatcgacaagaaaaagaaggacgccaagcagcaggccaccttcacactggccgatcctatcaatcaccctctgtgggtccgattcgaggaaagaagcggcagcaacctgaacaagtacagaatcctgaccgagcagctgcacaccgagaagctgaagaaaaagctgacagtgcagctggaccggctgatctaccctacagaatctggcggctgggaagagaagggcaaagtggacattgtgctgctgcccagccggcagttctacaaccagatcttcctggacatcgaggaaaagggcaagcacgccttcacctacaaggatgagagcatcaagttccctctgaagggcacactcggcggagccagagtgcagttcgacagagatcacctgagaagataccctcacaaggtggaaagcggcaacgtgggcagaatctacttcaacatgaccgtgaacatcgagcctacagagtccccagtgtccaagtctctgaagatccaccgggacgacttccccaaggtggtcaacttcaagcccaaagaactgaccgagtggatcaaggacagcaagggcaagaaactgaagtccggcatcgagtccctggaaatcggcctgagagtgatgagcatcgacctgggacagagacaggccgctgccgcctctattttcgaggtggtggatcagaagcccgacatcgaaggcaagctgtttttcccaatcaagggcaccgagctgtatgccgtgcacagagccagcttcaacatcaagctgcccggcgagacactggtcaagagcagagaagtgctgcggaaggccagagaggacaatctgaaactgatgaaccagaagctcaacttcctgcggaacgtgctgcacttccagcagttcgaggacatcaccgagagagagaagcgggtcaccaagtggatcagcagacaagagaacagcgacgtgcccctggtgtaccaggatgagctgatccagatccgcgagctgatgtacaagccttacaaggactgggtcgccttcctgaagcagctccacaagagactggaagtcgagatcggcaaagaagtgaagcactggcggaagtccctgagcgacggaagaaagggcctgtacggcatctccctgaagaacatcgacgagatcgatcggacccggaagttcctgctgagatggtccctgaggcctaccgaacctggcgaagtgcgtagactggaacccggccagagattcgccatcgaccagctgaatcacctgaacgccctgaaagaagatcggctgaagaagatggccaacaccatcatcatgcacgccctgggctactgctacgacgtgcggaagaagaaatggcaggctaagaaccccgcctgccagatcatcctgttcgaggatctgagcaactacaacccctacgaggaaaggtcccgcttcgagaacagcaagctcatgaagtggtccagacgcgagatccccagacaggttgcactgcagggcgagatctatggcctgcaagtgggagaagtgggcgctcagttcagcagcagattccacgccaagacaggcagccctggcatcagatgtagcgtcgtgaccaaagagaagctgcaggacaatcggttcttcaagaatctgcagagagagggcagactgaccctggacaaaatcgccgtgctgaaagagggcgatctgtacccagacaaaggcggcgagaagttcatcagcctgagcaaggatcggaagtgcgtgaccacacacgccgacatcaacgccgctcagaacctgcagaagcggttctggacaagaacccacggcttctacaaggtgtactgcaaggcctaccaggtggacggccagaccgtgtacatccctgagagcaaggaccagaagcagaagatcatcgaagagttcggcgagggctacttcattctgaaggacggggtgtacgaatgggtcaacgccggcaagggaggctctggaggaagctccgaagtcgagttttcccatgagtactggatgagacacgcattgactctcgcaaagagggctcgagatgaacgcgaggtgcccgtgggggcagtactcgtgctcaacaatcgcgtaatcggcgaaggttggaatagggcaatcggactccacgaccccactgcacatgcggaaatcatggcccttcgacagggagggcttgtgatgcagaattatcgactttatgatgcgacgctgtacgtcacgtttgaaccttgcgtaatgtgcgcgggagctatgattcactcccgcattggacgagttgtattcggtgttcgcaacgccaagacgggtgccgcaggttcactgatggacgtgctgcatcatccaggcatgaaccaccgggtagaaatcacagaaggcatattggcggacgaatgtgcggcgctgttgtgtcgtttttttcgcatgcccaggcgggtctttaacgcccagaaaaaagcacaatcctctactgacggctcttctggatctgaaacacctggcacaagcgagagcgccacccctgagagctctggcctgaaaatcaagaagggcagctccaagcagagcagcagcgagctggtggatagcgacatcctgaaagacagcttcgacctggcctccgagctgaaaggcgaaaagctgatgctgtacagggaccccagcggcaatgtgttccccagcgacaaatggatggccgctggcgtgttcttcggaaagctggaacgcatcctgatcagcaagctgaccaaccagtactccatcagcaccatcgaggacgacagcagcaagcagtctatgaaaaggccggcggccacgaaaaaggccggccaggcaaaaaagaaaaagggatcctacccatacgatgttccagattacgcttatccctacgacgtgcctgattatgcatacccatatgatgtccccgactatgcctaa

SEQ ID NO: 14 - protein, 1361 aa, synthetic construct
  REGION 1..1361: note = Description of artificial sequence: BhCas12b GGSGGS-ABE8-Xten20 at K1019 polypeptide sequence
MAPKKKRKVGIHGVPAAATRSFILKIEPNEEVKKGLWKTHEVLNHGIAYYMNILKLIRQEAIYEHHEQDPKNPKKVSKAEIQAELWDFVLKMQKCNSFTHEVDKDEVFNILRELYEELVPSSVEKKGEANQLSNKFLYPLVDPNSQSGKGTASSGRKPRWYNLKIAGDPSWEEEKKKWEEDKKKDPLAKILGKLAEYGLIPLFIPYTDSNEPIVKEIKWMEKSRNQSVRRLDKDMFIQALERFLSWESWNLKVKEEYEKVEKEYKTLEERIKEDIQALKALEQYEKERQEQLLRDTLNTNEYRLSKRGLRGWREIIQKWLKMDENEPSEKYLEVFKDYQRKHPREAGDYSVYEFLSKKENHFIWRNHPEYPYLYATFCEIDKKKKDAKQQATFTLADPINHPLWVRFEERSGSNLNKYRILTEQLHTEKLKKKLTVQLDRLIYPTESGGWEEKGKVDIVLLPSRQFYNQIFLDIEEKGKHAFTYKDESIKFPLKGTLGGARVQFDRDHLRRYPHKVESGNVGRIYFNMTVNIEPTESPVSKSLKIHRDDFPKVVNFKPKELTEWIKDSKGKKLKSGIESLEIGLRVMSIDLGQRQAAAASIFEVVDQKPDIEGKLFFPIKGTELYAVHRASFNIKLPGETLVKSREVLRKAREDNLKLMNQKLNFLRNVLHFQQFEDITEREKRVTKWISRQENSDVPLVYQDELIQIRELMYKPYKDWVAFLKQLHKRLEVEIGKEVKHWRKSLSDGRKGLYGISLKNIDEIDRTRKFLLRWSLRPTEPGEVRRLEPGQRFAIDQLNHLNALKEDRLKKMANTIIMHALGYCYDVRKKKWQAKNPACQIILFEDLSNYNPYEERSRFENSKLMKWSRREIPRQVALQGEIYGLQVGEVGAQFSSRFHAKTGSPGIRCSVVTKEKLQDNRFFKNLQREGRLTLDKIAVLKEGDLYPDKGGEKFISLSKDRKCVTTHADINAAQNLQKRFWTRTHGFYKVYCKAYQVDGQTVYIPESKDQKQKIIEEFGEGYFILKDGVYEWVNAGKGGSGGSSEVEFSHEYWMRHALTLAKRARDEREVPVGAVLVLNNRVIGEGWNRAIGLHDPTAHAEIMALRQGGLVMQNYRLYDATLYVTFEPCVMCAGAMIHSRIGRVVFGVRNAKTGAAGSLMDVLHHPGMNHRVEITEGILADECAALLCRFFRMPRRVFNAQKKAQSSTDGSSGSETPGTSESATPESSGLKIKKGSSKQSSSELVDSDILKDSFDLASELKGEKLMLYRDPSGNVFPSDKWMAAGVFFGKLERILISKLTNQYSISTIEDDSSKQSMKRPAATKKAGQAKKKKGSYPYDVPDYAYPYDVPDYAYPYDVPDYA

SEQ ID NO: 15 - protein, 229 aa, Rattus norvegicus [sequence omitted]

SEQ ID NO: 16 - protein, 1147 aa, Bacillus hisashii
MAPKKKRKVGIHGVPAAATRSFILKIEPNEEVKKGLWKTHEVLNHGIAYYMNILKLIRQEAIYEHHEQDPKNPKKVSKAEIQAELWDFVLKMQKCNSFTHEVDKDEVFNILRELYEELVPSSVEKKGEANQLSNKFLYPLVDPNSQSGKGTASSGRKPRWYNLKIAGDPSWEEEKKKWEEDKKKDPLAKILGKLAEYGLIPLFIPYTDSNEPIVKEIKWMEKSRNQSVRRLDKDMFIQALERFLSWESWNLKVKEEYEKVEKEYKTLEERIKEDIQALKALEQYEKERQEQLLRDTLNTNEYRLSKRGLRGWREIIQKWLKMDENEPSEKYLEVFKDYQRKHPREAGDYSVYEFLSKKENHFIWRNHPEYPYLYATFCEIDKKKKDAKQQATFTLADPINHPLWVRFEERSGSNLNKYRILTEQLHTEKLKKKLTVQLDRLIYPTESGGWEEKGKVDIVLLPSRQFYNQIFLDIEEKGKHAFTYKDESIKFPLKGTLGGARVQFDRDHLRRYPHKVESGNVGRIYFNMTVNIEPTESPVSKSLKIHRDDFPKVVNFKPKELTEWIKDSKGKKLKSGIESLEIGLRVMSIDLGQRQAAAASIFEVVDQKPDIEGKLFFPIKGTELYAVHRASFNIKLPGETLVKSREVLRKAREDNLKLMNQKLNFLRNVLHFQQFEDITEREKRVTKWISRQENSDVPLVYQDELIQIRELMYKPYKDWVAFLKQLHKRLEVEIGKEVKHWRKSLSDGRKGLYGISLKNIDEIDRTRKFLLRWSLRPTEPGEVRRLEPGQRFAIDQLNHLNALKEDRLKKMANTIIMHALGYCYDVRKKKWQAKNPACQIILFEDLSNYNPYGERSRFENSRLMKWSRREIPRQVALQGEIYGLQVGEVGAQFSSRFHAKTGSPGIRCRVVTKEKLQDNRFFKNLQREGRLTLDKIAVLKEGDLYPDKGGEKFISLSKDRKCVTTHADINAAQNLQKRFWTRTHGFYKVYCKAYQVDGQTVYIPESKDQKQKIIEEFGEGYFILKDGVYEWVNAGKLKIKKGSSKQSSSELVDSDILKDSFDLASELKGEKLMLYRDPSGNVFPSDKWMAAGVFFGKLERILISKLTNQYSISTIEDDSSKQSMSGGSKRTADGSEFESPKKKRKVE

SEQ ID NO: 17 - protein, 208 aa, Petromyzon marinus
  REGION 1..208: note = MISC_FEATURE - tr|A5H718|A5H718_PETMA Cytosine deaminase OS=Petromyzon marinus OX=7757 PE=2 SV=1 amino acid sequence; PmCDA1 polypeptide sequence
MTDAEYVRIHEKLDIYTFKKQFFNNKKSVSHRCYVLFELKRRGERRACFWGYAVNKPQSGTERGIHAEIFSIRKVEEYLRDNPGQFTINWYSSWSPCADCAEKILEWYNQELRGNGHTLKIWACKLYYEKNARNQIGLWNLRDNGVGLNVMVSEHYQCCRKIFIQSSHNQLNENRWLEKTLKRAEKRRSELSIMIQVKILHTTKSPAV

SEQ ID NO: 18 - DNA, 766 bp, Petromyzon marinus
  misc_feature 1..766: note = EF094822.1 Petromyzon marinus isolate PmCDA.21 cytosine deaminase mRNA, complete cds; PmCDA1 polynucleotide sequence
  source 1..766: mol_type = other DNA
tgacacgacacagccgtgtatatgaggaagggtagctggatggggggggggggaatacgttcagagaggacattagcgagcgtcttgttggtggccttgagtctagacacctgcagacatgaccgacgctgagtacgtgagaatccatgagaagttggacatctacacgtttaagaaacagtttttcaacaacaaaaaatccgtgtcgcatagatgctacgttctctttgaattaaaacgacggggtgaacgtagagcgtgtttttggggctatgctgtgaataaaccacagagcgggacagaacgtggaattcacgccgaaatctttagcattagaaaagtcgaagaatacctgcgcgacaaccccggacaattcacgataaattggtactcatcctggagtccttgtgcagattgcgctgaaaagatcttagaatggtataaccaggagctgcgggggaacggccacactttgaaaatctgggcttgcaaactctattacgagaaaaatgcgaggaatcaaattgggctgtggaacctcagagataacggggttgggttgaatgtaatggtaagtgaacactaccaatgttgcaggaaaatattcatccaatcgtcgcacaatcaattgaatgagaatagatggcttgagaagactttgaagcgagctgaaaaacgacggagcgagttgtccattatgattcaggtaaaaatactccacaccactaagagtcctgctgtttaagaggctatgcggatggttttc

SEQ ID NO: 19 - protein, 145 aa, Homo sapiens
  REGION 1..145: note = MISC_FEATURE - tr|Q6QJ80|Q6QJ80_HUMAN Activation-induced cytidine deaminase OS=Homo sapiens; OX = 9606 GN=AICDA PE=2 SV=1; AID polypeptide sequence
MDSLLMNRRKFLYQFKNVRWAKGRRETYLCYVVKRRDSATSFSLDFGYLRNKNGCHVELLFLRYISDWDLDPGRCYRVTWFTSWSPCYDCARHVADFLRGNPNLSLRIFTARLYFCEDRKAEPEGLRRLHRAGVQIAIMTFKAPV

SEQ ID NO: 20 - DNA, 10681 bp, Homo sapiens
  misc_feature 1..10681: note = NG_011588.1:5001-15681 Homo sapiens activation induced cytidine deaminase (AICDA), RefSeqGene (LRG_17) on chromosome 12; nucleic acid sequence of the CDS of human AID; polynucleotide sequence
  source 1..10681: mol_type = other DNA
agagaaccatcattaattgaagtgagatttttctggcctgagacttgcagggaggcaagaagacactctggacaccactatggacaggtaaagaggcagtcttctcgtgggtgattgcactggccttcctctcagagcaaatctgagtaatgagactggtagctatccctttctctcatgtaactgtctgactgataagatcagcttgatcaatatgcatatatattttttgatctgtctccttttcttctattcagatcttatacgctgtcagcccaattctttctgtttcagacttctcttgatttccctctttttcatgtggcaaaagaagtagtgcgtacaatgtactgattcgtcctgagatttgtaccatggttgaaactaatttatggtaataatattaacatagcaaatctttagagactcaaatcatgaaaaggtaatagcagtactgtactaaaaacggtagtgctaattttcgtaataattttgtaaatattcaacagtaaaacaacttgaagacacactttcctagggaggcgttactgaaataatttagctatagtaagaaaatttgtaattttagaaatgccaagcattctaaattaattgcttgaaagtcactatgattgtgtccattataaggagacaaattcattcaagcaagttatttaatgttaaaggcccaattgttaggcagttaatggcacttttactattaactaatctttccatttgttcagacgtagcttaacttacctcttaggtgtgaatttggttaaggtcctcataatgtctttatgtgcagtttttgataggttattgtcatagaacttattctattcctacatttatgattactatggatgtatgagaataacacctaatccttatactttacctcaatttaactcctttataaagaacttacattacagaataaagattttttaaaaatatatttttttgtagagacagggtcttagcccagccgaggctggtctctaagtcctggcccaagcgatcctcctgcctgggcctcctaaagtgctggaattatagacatgagccatcacatccaatatacagaataaagatttttaatggaggatttaatgttcttcagaaaattttcttgaggtcagacaatgtcaaatgtctcctcagtttacactgagattttgaaaacaagtctgagctataggtccttgtgaagggtccattggaaatacttgttcaaagtaaaatggaaagcaaaggtaaaatcagcagttgaaattcagagaaagacagaaaaggagaaaagatgaaattcaacaggacagaagggaaatatattatcattaaggaggacagtatctgtagagctcattagtgatggcaaaatgacttggtcaggattatttttaacccgcttgtttctggtttgcacggctggggatgcagctagggttctgcctcagggagcacagctgtccagagcagctgtcagcctgcaagcctgaaacactccctcggtaaagtccttcctactcaggacagaaatgacgagaacagggagctggaaacaggcccctaaccagagaagggaagtaatggatcaacaaagttaactagcaggtcaggatcacgcaattcatttcactctgactggtaacatgtgacagaaacagtgtaggcttattgtattttcatgtagagtaggacccaaaaatccacccaaagtcctttatctatgccacatccttcttatctatacttccaggacactttttcttccttatgataaggctctctctctctccacacacacacacacacacacacacacacacacacacacacacacaaacacacaccccgccaaccaaggtgcatgtaaaaagatgtagattcctctgcctttctcatctacacagcccaggagggtaagttaatataagagggatttattggtaagagatgatgcttaatctgtttaacactgggcctcaaagagagaatttcttttcttctgtacttattaagcacctattatgtgttgagcttatatatacaaagggttattatatgctaatatagtaatagtaatggtggttggtactatggtaattaccataaaaattattatccttttaaaataaagctaattattattggatcttttttagtattcattttatgttttttatgtttttgattttttaaaagacaatctcaccctgttacccaggctggagtgcagtggtgcaatcatagctttctgcagtcttgaactcctgggctcaagcaatcctcctgccttggcctcccaaagtgttgggatacagtcatgagccactgcatctggcctaggatccatttagattaaaatatgcattttaaattttaaaataatatggctaatttttaccttatgtaatgtgtatactggcaataaatctagtttgctgcctaaagtttaaagtgctttccagtaagcttcatgtacgtgaggggagacatttaaagtgaaacagacagccaggtgtggtggctcacgcctgtaatcccagcactctgggaggctgaggtgggtggatcgcttgagccctggagttcaagaccagcctgagcaacatggcaaaacgctgtttctataacaaaaattagccgggcatggtggcatgtgcctgtggtcccagctactagggggctgaggcaggagaatcgttggagcccaggaggtcaaggctgcactgagcagtgcttgcgccactgcactccagcctgggtgacaggaccagaccttgcctcaaaaaaataagaagaaaaattaaaaataaatggaaacaactacaaagagctgttgtcctagatgagctacttagttaggctgatattttggtatttaacttttaaagtcagggtctgtcacctgcactacattattaaaatatcaattctcaatgtatatccacacaaagactggtacgtgaatgttcatagtacctttattcacaaaaccccaaagtagagactatccaaatatccatcaacaagtgaacaaataaacaaaatgtgctatatccatgcaatggaataccaccctgcagtacaaagaagctacttggggatgaatcccaaagtcatgacgctaaatgaaagagtcagacatgaaggaggagataatgtatgccatacgaaattctagaaaatgaaagtaacttatagttacagaaagcaaatcagggcaggcatagaggctcacacctgtaatcccagcactttgagaggccacgtgggaagattgctagaactcaggagttcaagaccagcctgggcaacacagtgaaactccattctccacaaaaatgggaaaaaaagaaagcaaatcagtggttgtcctgtggggaggggaaggactgcaaagagggaagaagctctggtggggtgagggtggtgattcaggttctgtatcctgactgtggtagcagtttggggtgtttacatccaaaaatattcgtagaattatgcatcttaaatgggtggagtttactgtatgtaaattatacctcaatgtaagaaaaaataatgtgtaagaaaactttcaattctcttgccagcaaacgttattcaaattcctgagccctttacttcgcaaattctctgcacttctgccccgtaccattaggtgacagcactagctccacaaattggataaatgcatttctggaaaagactagggacaaaatccaggcatcacttgtgctttcatatcaaccatgctgtacagcttgtgttgctgtctgcagctgcaatggggactcttgatttctttaaggaaacttgggttaccagagtatttccacaaatgctattcaaattagtgcttatgatatgcaagacactgtgctaggagccagaaaacaaagaggaggagaaatcagtcattatgtgggaacaacatagcaagatatttagatcattttgactagttaaaaaagcagcagagtacaaaatcacacatgcaatcagtataatccaaatcatgtaaatatgtgcctgtagaaagactagaggaataaacacaagaatcttaacagtcattgtcattagacactaagtctaattattattattagacactatgatatttgagatttaaaaaatctttaatattttaaaatttagagctcttctatttttccatagtattcaagtttgacaatgatcaagtattactctttctttttttttttttttttttttttttgagatggagttttggtcttgttgcccatgctggagtggaatggcatgaccatagctcactgcaacctccacctcctgggttcaagcaaagctgtcgcctcagcctcccgggtagatgggattacaggcgcccaccaccacactcggctaatgtttgtatttttagtagagatggggtttcaccatgttggccaggctggtctcaaactcctgacctcagaggatccacctgcctcagcctcccaaagtgctgggattacagatgtaggccactgcgcccggccaagtattgctcttatacattaaaaaacaggtgtgagccactgcgcccagccaggtattgctcttatacattaaaaaataggccggtgcagtggctcacgcctgtaatcccagcactttgggaagccaaggcgggcagaacacccgaggtcaggagtccaaggccagcctggccaagatggtgaaaccccgtctctattaaaaatacaaacattacctgggcatgatggtgggcgcctgtaatcccagctactcaggaggctgaggcaggaggatccgcggagcctggcagatctgcctgagcctgggaggttgaggctacagtaagccaagatcatgccagtatacttcagcctgggcgacaaagtgagaccgtaacaaaaaaaaaaaaatttaaaaaaagaaatttagatcaagatccaactgtaaaaagtggcctaaacaccacattaaagagtttggagtttattctgcaggcagaagagaaccatcagggggtcttcagcatgggaatggcatggtgcacctggtttttgtgagatcatggtggtgacagtgtggggaatgttattttggagggactggaggcagacagaccggttaaaaggccagcacaacagataaggaggaagaagatgagggcttggaccgaagcagagaagagcaaacagggaaggtacaaattcaagaaatattggggggtttgaatcaacacatttagatgattaattaaatatgaggactgaggaataagaaatgagtcaaggatggttccaggctgctaggctgcttacctgaggtggcaaagtcgggaggagtggcagtttaggacagggggcagttgaggaatattgttttgatcattttgagtttgaggtacaagttggacacttaggtaaagactggaggggaaatctgaatatacaattatgggactgaggaacaagtttattttattttttgtttcgttttcttgttgaagaacaaatttaattgtaatcccaagtcatcagcatctagaagacagtggcaggaggtgactgtcttgtgggtaagggtttggggtccttgatgagtatctctcaattggccttaaatataagcaggaaaaggagtttatgatggattccaggctcagcagggctcaggagggctcaggcagccagcagaggaagtcagagcatcttctttggtttagcccaagtaatgacttccttaaaaagctgaaggaaaatccagagtgaccagattataaactgtactcttgcattttctctccctcctctcacccacagcctcttgatgaaccggaggaagtttctttaccaattcaaaaatgtccgctgggctaagggtcggcgtgagacctacctgtgctacgtagtgaagaggcgtgacagtgctacatccttttcactggactttggttatcttcgcaataaggtatcaattaaagtcggctttgcaagcagtttaatggtcaactgtgagtgcttttagagccacctgctgatggtattacttccatccttttttggcatttgtgtctctatcacattcctcaaatccttttttttatttctttttccatgtccatgcacccatattagacatggcccaaaatatgtgatttaattcctccccagtaatgctgggcaccctaataccactccttccttcagtgccaagaacaactgctcccaaactgtttaccagctttcctcagcatctgaattgcctttgagattaattaagctaaaagcatttttatatgggagaatattatcagcttgtccaagcaaaaattttaaatgtgaaaaacaaattgtgtcttaagcatttttgaaaattaaggaagaagaatttgggaaaaaattaacggtggctcaattctgtcttccaaatgatttcttttccctcctactcacatgggtcgtaggccagtgaatacattcaacatggtgatccccagaaaactcagagaagcctcggctgatgattaattaaattgatctttcggctacccgagagaattacatttccaagagacttcttcaccaaaatccagatgggtttacataaacttctgcccacgggtatctcctctctcctaacacgctgtgacgtctgggcttggtggaatctcagggaagcatccgtggggtggaaggtcatcgtctggctcgttgtttgatggttatattaccatgcaattttctttgcctacatttgtattgaatacatcccaatctccttcctattcggtgacatgacacattctatttcagaaggctttgattttatcaagcactttcatttacttctcatggcagtgcctattacttctcttacaatacccatctgtctgctttaccaaaatctatttccccttttcagatcctcccaaatggtcctcataaactgtcctgcctccacctagtggtccaggtatatttccacaatgttacatcaacaggcacttctagccattttccttctcaaaaggtgcaaaaagcaacttcataaacacaaattaaatcttcggtgaggtagtgtgatgctgcttcctcccaactcagcgcacttcgtcttcctcattccacaaaaacccatagccttccttcactctgcaggactagtgctgccaagggttcagctctacctactggtgtgctcttttgagcaagttgcttagcctctctgtaacacaaggacaatagctgcaagcatccccaaagatcattgcaggagacaatgactaaggctaccagagccgcaataaaagtcagtgaattttagcgtggtcctctctgtctctccagaacggctgccacgtggaattgctcttcctccgctacatctcggactgggacctagaccctggccgctgctaccgcgtcacctggttcacctcctggagcccctgctacgactgtgcccgacatgtggccgactttctgcgagggaaccccaacctcagtctgaggatcttcaccgcgcgcctctacttctgtgaggaccgcaaggctgagcccgaggggctgcggcggctgcaccgcgccggggtgcaaatagccatcatgaccttcaaaggtgcgaaagggccttccgcgcaggcgcagtgcagcagcccgcattcgggattgcgatgcggaatgaatgagttagtggggaagctcgaggggaagaagtgggcggggattctggttcacctctggagccgaaattaaagattagaagcagagaaaagagtgaatggctcagagacaaggccccgaggaaatgagaaaatggggccagggttgcttctttcccctcgatttggaacctgaactgtcttctacccccatatccccgcctttttttcctttttttttttttgaagattatttttactgctggaatacttttgtagaaaaccacgaaagaactttcaaagcctgggaagggctgcatgaaaattcagttcgtctctccagacagcttcggcgcatccttttggtaaggggcttcctcgctttttaaattttctttctttctctacagtcttttttggagtttcgtatatttcttatattttcttattgttcaatcactctcagttttcatctgatgaaaactttatttctcctccacatcagctttttcttctgctgtttcaccattcagagccctctgctaaggttccttttccctcccttttctttcttttgttgtttcacatctttaaatttctgtctctccccagggttgcgtttccttcctggtcagaattcttttctcctttttttttttttttttttttttttttaaacaaacaaacaaaaaacccaaaaaaactctttcccaatttactttcttccaacatgttacaaagccatccactcagtttagaagactctccggccccaccgacccccaacctcgttttgaagccattcactcaatttgcttctctctttctctacagcccctgtatgaggttgatgacttacgagacgcatttcgtactttgggactttgatagcaacttccaggaatgtcacacacgatgaaatatctctgctgaagacagtggataaaaaacagtccttcaagtcttctctgtttttattcttcaactctcactttcttagagtttacagaaaaaatatttatatacgactctttaaaaagatctatgtcttgaaaatagagaaggaacacaggtctggccagggacgtgctgcaattggtgcagttttgaatgcaacattgtcccctactgggaataacagaactgcaggacctgggagcatcctaaagtgtcaacgtttttctatgacttttaggtaggatgagagcagaaggtagatcctaaaaagcatggtgagaggatcaaatgtttttatatcaacatcctttattatttgattcatttgagttaacagtggtgttagtgatagatttttctattcttttcccttgacgtttactttcaagtaacacaaactcttccatcaggccatgatctataggacctcctaatgagagtatctgggtgattgtgaccccaaaccatctctccaaagcattaatatccaatcatgcgctgtatgttttaatcagcagaagcatgtttttatgtttgtacaaaagaagattgttatgggtggggatggaggtatagaccatgcatggtcaccttcaagctactttaataaaggatcttaaaatgggcaggaggactgtgaacaagacaccctaataatgggttgatgtctgaagtagcaaatcttctggaaacgcaaactcttttaaggaagtccctaatttagaaacacccacaaacttcacatatcataattagcaaacaattggaaggaagttgcttgaatgttggggagaggaaaatctattggctctcgtgggtctcttcatctcagaaatgccaatcaggtcaaggtttgctacattttgtatgtgtgtgatgcttctcccaaaggtatattaactatataagagagttgtgacaaaacagaatgataaagctgcgaaccgtggcacacgctcatagttctagctgcttgggaggttgaggagggaggatggcttgaacacaggtgttcaaggccagcctgggcaacataacaagatcctgtctctcaaaaaaaaaaaaaaaaaaaagaaagagagagggccgggcgtggtggctcacgcctgtaatcccagcactttgggaggccgagccgggcggatcacctgtggtcaggagtttgagaccagcctggccaacatggcaaaaccccgtctgtactcaaaatgcaaaaattagccaggcgtggtagcaggcacctgtaatcccagctacttgggaggctgaggcaggagaatcgcttgaacccaggaggtggaggttgcagtaagctgagatcgtgccgttgcactccagcctgggcgacaagagcaagactctgtctcagaaaaaaaaaaaaaaaagagagagagagagaaagagaacaatatttgggagagaaggatggggaagcattgcaaggaaattgtgctttatccaacaaaatgtaaggagccaataagggatccctatttgtctcttttggtgtctatttgtccctaacaactgtctttgacagtgagaaaaatattcagaataaccatatccctgtgccgttattacctagcaacccttgcaatgaagatgagcagatccacaggaaaacttgaatgcacaactgtcttattttaatcttattgtacataagtttgtaaaagagttaaaaattgttacttcatgtattcatttatattttatattattttgcgtctaatgattttttattaacatgatttccttttctgatatattgaaatggagtctcaaagcttcataaatttataactttagaaatgattctaataacaacgtatgtaattgtaacattgcagtaatggtgctacgaagccatttctcttgatttttagtaaacttttatgacagcaaatttgcttctggctcactttcaatcagttaaataaatgataaataattttggaagctgtgaagataaaataccaaataaaataatataaaagtgatttatatgaagttaaaataaaaaatcagtatgatggaataaacttg

SEQ ID NO: 21 - protein, 198 aa, Homo sapiens [sequence omitted]

SEQ ID NO: 22 - protein, 198 aa, Canis familiaris
  REGION 1..198: note = MISC_FEATURE - Canine AID (clAID) polypeptide sequence
  REGION 1..30: note = MISC_FEATURE - Nuclear localization sequence
  REGION 183..198: note = MISC_FEATURE - Nuclear export signal
MDSLLMKQRKFLYHFKNVRWAKGRHETYLCYVVKRRDSATSFSLDFGHLRNKSGCHVELLFLRYISDWDLDPGRCYRVTWFTSWSPCYDCARHVADFLRGYPNLSLRIFAARLYFCEDRKAEPEGLRRLHRAGVQIAIMTFKDYFYCWNTFVENREKTFKAWEGLHENSVRLSRQLRRILLPLYEVDDLRDAFRTLGL

SEQ ID NO: 23 - protein, 199 aa, Bos taurus
  REGION 1..199: note = MISC_FEATURE - Bovine AID (btAID) polypeptide sequence
  REGION 1..30: note = MISC_FEATURE - Nuclear localization sequence
  REGION 183..199: note = MISC_FEATURE - Nuclear export signal
MDSLLKKQRQFLYQFKNVRWAKGRHETYLCYVVKRRDSPTSFSLDFGHLRNKAGCHVELLFLRYISDWDLDPGRCYRVTWFTSWSPCYDCARHVADFLRGYPNLSLRIFTARLYFCDKERKAEPEGLRRLHRAGVQIAIMTFKDYFYCWNTFVENHERTFKAWEGLHENSVRLSRQLRRILLPLYEVDDLRDAFRTLGL

SEQ ID NO: 24 - protein, 239 aa, Rattus sp.
  REGION 1..239: note = MISC_FEATURE - Rat AID polypeptide sequence
  REGION 1..26: note = MISC_FEATURE - Nuclear localization sequence
  REGION 194..239: note = MISC_FEATURE - Nuclear export signal
MAVGSKPKAALVGPHWERERIWCFLCSTGLGTQQTGQTSRWLRPAATQDPVSPPRSLLMKQRKFLYHFKNVRWAKGRHETYLCYVVKRRDSATSFSLDFGYLRNKSGCHVELLFLRYISDWDLDPGRCYRVTWFTSWSPCYDCARHVADFLRGNPNLSLRIFTARLTGWGALPAGLMSPARPSDYFYCWNTFVENHERTFKAWEGLHENSVRLSRRLRRILLPLYEVDDLRDAFRTLGL

SEQ ID NO: 25 - protein, 198 aa, Mus musculus [sequence omitted]

SEQ ID NO: 26 - protein, 229 aa, Mesocricetus auratus
  REGION 1..229: note = MISC_FEATURE - maAPOBEC-1 polypeptide sequence
MSSETGPVVVDPTLRRRIEPHEFDAFFDQGELRKETCLLYEIRWGGRHNIWRHTGQNTSRHVEINFIEKFTSERYFYPSTRCSIVWFLSWSPCGECSKAITEFLSGHPNVTLFIYAARLYHHTDQRNRQGLRDLISRGVTIRIMTEQEYCYCWRNFVNYPPSNEVYWPRYPNLWMRLYALELYCIHLGLPPCLKIKRRHQYPLTFFRLNLQSCHYQRIPPHILWATGFI

SEQ ID NO: 27 - protein, 236 aa, Pongo pygmaeus
  REGION 1..236: note = MISC_FEATURE - ppAPOBEC-1 polypeptide sequence
MTSEKGPSTGDPTLRRRIESWEFDVFYDPRELRKETCLLYEIKWGMSRKIWRSSGKNTTNHVEVNFIKKFTSERRFHSSISCSITWFLSWSPCWECSQAIREFLSQHPGVTLVIYVARLFWHMDQRNRQGLRDLVNSGVTIQIMRASEYYHCWRNFVNYPPGDEAHWPQYPPLWMMLYALELHCIILSLPPCLKISRRWQNHLAFFRLHLQNCHYQTIPPHILLATGLIHPSVTWR

SEQ ID NO: 28 - protein, 236 aa, Oryctolagus cuniculus
  REGION 1..236: note = MISC_FEATURE - ocAPOBEC1 polypeptide sequence
MASEKGPSNKDYTLRRRIEPWEFEVFFDPQELRKEACLLYEIKWGASSKTWRSSGKNTTNHVEVNFLEKLTSEGRLGPSTCCSITWFLSWSPCWECSMAIREFLSQHPGVTLIIFVARLFQHMDRRNRQGLKDLVTSGVTVRVMSVSEYCYCWENFVNYPPGKAAQWPRYPPRWMLMYALELYCIILGLPPCLKISRRHQKQLTFFSLTPQYCHYKMIPPYILLATGLLQPSVPWR

SEQ ID NO: 29 - protein, 235 aa, Monodelphis domestica
  REGION 1..235: note = MISC_FEATURE - mdAPOBEC-1 polypeptide sequence
MNSKTGPSVGDATLRRRIKPWEFVAFFNPQELRKETCLLYEIKWGNQNIWRHSNQNTSQHAEINFMEKFTAERHFNSSVRCSITWFLSWSPCWECSKAIRKFLDHYPNVTLAIFISRLYWHMDQQHRQGLKELVHSGVTIQIMSYSEYHYCWRNFVDYPQGEEDYWPKYPYLWIMLYVLELHCIILGLPPCLKISGSHSNQLALFSLDLQDCHYQKIPYNVLVATGLVQPFVTWR

SEQ ID NO: 30 - protein, 224 aa, Pongo pygmaeus
  REGION 1..224: note = MISC_FEATURE - ppAPOBEC-2 polypeptide sequence
MAQKEEAAAATEAASQNGEDLENLDDPEKLKELIELPPFEIVTGERLPANFFKFQFRNVEYSSGRNKTFLCYVVEAQGKGGQVQASRGYLEDEHAAAHAEEAFFNTILPAFDPALRYNVTWYVSSSPCAACADRIIKTLSKTKNLRLLILVGRLFMWEELEIQDALKKLKEAGCKLRIMKPQDFEYVWQNFVEQEEGESKAFQPWEDIQENFLYYEEKLADILK

SEQ ID NO: 31 - protein, 224 aa, Bos taurus
  REGION 1..224: note = MISC_FEATURE - btAPOBEC-2 polypeptide sequence
MAQKEEAAAAAEPASQNGEEVENLEDPEKLKELIELPPFEIVTGERLPAHYFKFQFRNVEYSSGRNKTFLCYVVEAQSKGGQVQASRGYLEDEHATNHAEEAFFNSIMPTFDPALRYMVTWYVSSSPCAACADRIVKTLNKTKNLRLLILVGRLFMWEEPEIQAALRKLKEAGCRLRIMKPQDFEYIWQNFVEQEEGESKAFEPWEDIQENFLYYEEKLADILK

SEQ ID NO: 32 - protein, 440 aa, Mus musculus
  REGION 1..440: note = MISC_FEATURE - mAPOBEC-3-(1) polypeptide sequence
MQPQRLGPRAGMGPFCLGCSHRKCYSPIRNLISQETFKFHFKNLGYAKGRKDTFLCYEVTRKDCDSPVSLHHGVFKNKDNIHAEICFLYWFHDKVLKVLSPREEFKITWYMSWSPCFECAEQIVRFLATHHNLSLDIFSSRLYNVQDPETQQNLCRLVQEGAQVAAMDLYEFKKCWKKFVDNGGRRFRPWKRLLTNFRYQDSKLQEILRPCYISVPSSSSSTLSNICLTKGLPETRFWVEGRRMDPLSEEEFYSQFYNQRVKHLCYYHRMKPYLCYQLEQFNGQAPLKGCLLSEKGKQHAEILFLDKIRSMELSQVTITCYLTWSPCPNCAWQLAAFKRDRPDLILHIYTSRLYFHWKRPFQKGLCSLWQSGILVDVMDLPQFTDCWTNFVNPKRPFWPWKGLEIISRRTQRRLRRIKESWGLQDLVNDFGNLQLGPPMS

SEQ ID NO: 33 - protein, 429 aa, Mus musculus
  REGION 1..429: note = MISC_FEATURE - APOBEC-3-(2) (Mouse APOBEC-3) polypeptide sequence
  REGION 71..108: note = MISC_FEATURE - Nucleic acid editing domain
  REGION 288..319: note = MISC_FEATURE - Nucleic acid editing domain
MGPFCLGCSHRKCYSPIRNLISQETFKFHFKNLGYAKGRKDTFLCYEVTRKDCDSPVSLHHGVFKNKDNIHAEICFLYWFHDKVLKVLSPREEFKITWYMSWSPCFECAEQIVRFLATHHNLSLDIFSSRLYNVQDPETQQNLCRLVQEGAQVAAMDLYEFKKCWKKFVDNGGRRFRPWKRLLTNFRYQDSKLQEILRPCYIPVPSSSSSTLSNICLTKGLPETRFCVEGRRMDPLSEEEFYSQFYNQRVKHLCYYHRMKPYLCYQLEQFNGQAPLKGCLLSEKGKQHAEILFLDKIRSMELSQVTITCYLTWSPCPNCAWQLAAFKRDRPDLILHIYTSRLYFHWKRPFQKGLCSLWQSGILVDVMDLPQFTDCWTNFVNPKRPFWPWKGLEIISRRTQRRLRRIKESWGLQDLVNDFGNLQLGPPMS

SEQ ID NO: 34 - protein, 430 aa, Rattus sp.
  REGION 1..430: note = MISC_FEATURE - APOBEC-3 polypeptide sequence
  REGION 72..109: note = MISC_FEATURE - Nucleic acid editing domain
  REGION 289..320: note = MISC_FEATURE - Nucleic acid editing domain
MGPFCLGCSHRKCYSPIRNLISQETFKFHFKNRLRYAIDRKDTFLCYEVTRKDCDSPVSLHHGVFKNKDNIHAEICFLYWFHDKVLKVLSPREEFKITWYMSWSPCFECAEQVLRFLATHHNLSLDIFSSRLYNIRDPENQQNLCRLVQEGAQVAAMDLYEFKKCWKKFVDNGGRRFRPWKKLLTNFRYQDSKLQEILRPCYIPVPSSSSSTLSNICLTKGLPETRFCVERRRVHLLSEEEFYSQFYNQRVKHLCYYHGVKPYLCYQLEQFNGQAPLKGCLLSEKGKQHAEILFLDKIRSMELSQVIITCYLTWSPCPNCAWQLAAFKRDRPDLILHIYTSRLYFHWKRPFQKGLCSLWQSGILVDVMDLPQFTDCWTNFVNPKRPFWPWKGLEIISRRTQRRLHRIKESWGLQDLVNDFGNLQLGPPMS

SEQ ID NO: 35 - protein, 199 aa, Homo sapiens
  REGION 1..199: note = MISC_FEATURE - hAPOBEC-3A polypeptide sequence
  REGION 70..106: note = MISC_FEATURE - Nucleic acid editing domain
MEASPASGPRHLMDPHIFTSNFNNGIGRHKTYLCYEVERLDNGTSVKMDQHRGFLHNQAKNLLCGFYGRHAELRFLDLVPSLQLDPAQIYRVTWFISWSPCFSWGCAGEVRAFLQENTHVRLRIFAARIYDYDPLYKEALQMLRDAGAQVSIMTYDEFKHCWDTFVDHQGCPFQPWDGLDEHSQALSGRLRAILQNQGN

SEQ ID NO: 36 - protein, 373 aa, Homo sapiens
  REGION 1..373: note = MISC_FEATURE - hAPOBEC-3F polypeptide sequence
  REGION 65..99: note = MISC_FEATURE - Nucleic acid editing domain
  REGION 248..283: note = MISC_FEATURE - Nucleic acid editing domain
MKPHFRNTVERMYRDTFSYNFYNRPILSRRNTVWLCYEVKTKGPSRPRLDAKIFRGQVYSQPEHHAEMCFLSWFCGNQLPAYKCFQITWFVSWTPCPDCVAKLAEFLAEHPNVTLTISAARLYYYWERDYRRALCRLSQAGARVKIMDDEEFAYCWENFVYSEGQPFMPWYKFDDNYAFLHRTLKEILRNPMEAMYPHIFYFHFKNLRKAYGRNESWLCFTMEVVKHHSPVSWKRGVFRNQVDPETHCHAERCFLSWFCDDILSPNTNYEVTWYTSWSPCPECAGEVAEFLARHSNVNLTIFTARLYYFWDTDYQEGLRSLSQEGASVEIMGYKDFKYCWENFVYNDDEPFKPWKGLKYNFLFLDSKLQEILE

SEQ ID NO: 37 - protein, 370 aa, Macaca mulatta
  REGION 1..370: note = MISC_FEATURE - Rhesus macaque APOBEC-3G polypeptide sequence
  REGION 1..61: note = MISC_FEATURE - Cytoplasmic localization signal
MVEPMDPRTFVSNFNNRPILSGLNTVWLCCEVKTKDPSGPPLDAKIFQGKVYSKAKYHPEMRFLRWFHKWRQLHHDQEYKVTWYVSWSPCTRCANSVATFLAKDPKVTLTIFVARLYYFWKPDYQQALRILCQKRGGPHATMKIMNYNEFQDCWNKFVDGRGKPFKPRNNLPKHYTLLQATLGELLRHLMDPGTFTSNFNNKPWVSGQHETYLCYKVERLHNDTWVPLNQHRGFLRNQAPNIHGFPKGRHAELCFLDLIPFWKLDGQQYRVTCFTSWSPCFSCAQEMAKFISNNEHVSLCIFAARIYDDQGRYQEGLRALHRDGAKIAMMNYSEFEYCWDTFVDRQGRPFQPWDGLDEHSQALSGRLRAI

SEQ ID NO: 38 - protein, 384 aa, Pan troglodytes
  REGION 1..384: note = MISC_FEATURE - Chimpanzee APOBEC-3G polypeptide sequence
  REGION 1..60: note = MISC_FEATURE - Cytoplasmic localization signal
  REGION 65..100: note = MISC_FEATURE - Nucleic acid editing domain
  REGION 257..291: note = MISC_FEATURE - Nucleic acid editing domain
MKPHFRNPVERMYQDTFSDNFYNRPILSHRNTVWLCYEVKTKGPSRPPLDAKIFRGQVYSKLKYHPEMRFFHWFSKWRKLHRDQEYEVTWYISWSPCTKCTRDVATFLAEDPKVTLTIFVARLYYFWDPDYQEALRSLCQKRDGPRATMKIMNYDEFQHCWSKFVYSQRELFEPWNNLPKYYILLHIMLGEILRHSMDPPTFTSNFNNELWVRGRHETYLCYEVERLHNDTWVLLNQRRGFLCNQAPHKHGFLEGRHAELCFLDVIPFWKLDLHQDYRVTCFTSWSPCFSCAQEMAKFISNNKHVSLCIFAARIYDDQGRCQEGLRTLAKAGAKISIMTYSEFKHCWDTFVDHQGCPFQPWDGLEEHSQALSGRLRAILQNQGN

SEQ ID NO: 39 - protein, 377 aa, Chlorocebus sabaeus
  REGION 1..377: note = MISC_FEATURE - Green monkey APOBEC-3G polypeptide sequence
  REGION 1..60: note = MISC_FEATURE - Cytoplasmic localization signal
  REGION 65..100: note = MISC_FEATURE - Nucleic acid editing domain
  REGION 257..290: note = MISC_FEATURE - Nucleic acid editing domain
MNPQIRNMVEQMEPDIFVYYFNNRPILSGRNTVWLCYEVKTKDPSGPPLDANIFQGKLYPEAKDHPEMKFLHWFRKWRQLHRDQEYEVTWYVSWSPCTRCANSVATFLAEDPKVTLTIFVARLYYFWKPDYQQALRILCQERGGPHATMKIMNYNEFQHCWNEFVDGQGKPFKPRKNLPKHYTLLHATLGELLRHVMDPGTFTSNFNNKPWVSGQRETYLCYKVERSHNDTWVLLNQHRGFLRNQAPDRHGFPKGRHAELCFLDLIPFWKLDDQQYRVTCFTSWSPCFSCAQKMAKFISNNKHVSLCIFAARIYDDQGRCQEGLRTLHRDGAKIAVMNYSEFEYCWDTFVDRQGRPFQPWDGLDEHSQALSGRLRAI

SEQ ID NO: 40 - protein, 384 aa, Homo sapiens
  REGION 1..384: note = MISC_FEATURE - Human APOBEC-3G polypeptide sequence
  REGION 1..60: note = MISC_FEATURE - Cytoplasmic localization signal
  REGION 65..100: note = MISC_FEATURE - Nucleic acid editing domain
  REGION 257..291: note = MISC_FEATURE - Nucleic acid editing domain
MKPHFRNTVERMYRDTFSYNFYNRPILSRRNTVWLCYEVKTKGPSRPPLDAKIFRGQVYSELKYHPEMRFFHWFSKWRKLHRDQEYEVTWYISWSPCTKCTRDMATFLAEDPKVTLTIFVARLYYFWDPDYQEALRSLCQKRDGPRATMKIMNYDEFQHCWSKFVYSQRELFEPWNNLPKYYILLHIMLGEILRHSMDPPTFTFNFNNEPWVRGRHETYLCYEVERMHNDTWVLLNQRRGFLCNQAPHKHGFLEGRHAELCFLDVIPFWKLDLDQDYRVTCFTSWSPCFSCAQEMAKFISKNKHVSLCIFTARIYDDQGRCQEGLRTLAEAGAKISIMTYSEFKHCWDTFVDHQGCPFQPWDGLDEHSQDLSGRLRAILQNQEN

SEQ ID NO: 41 - protein, 382 aa, Homo sapiens
  REGION 1..382: note = MISC_FEATURE - Human APOBEC-3B polypeptide sequence
  REGION 66..100: note = MISC_FEATURE - Nucleic acid editing domain
  REGION 251..289: note = MISC_FEATURE - Nucleic acid editing domain
MNPQIRNPMERMYRDTFYDNFENEPILYGRSYTWLCYEVKIKRGRSNLLWDTGVFRGQVYFKPQYHAEMCFLSWFCGNQLPAYKCFQITWFVSWTPCPDCVAKLAEFLSEHPNVTLTISAARLYYYWERDYRRALCRLSQAGARVTIMDYEEFAYCWENFVYNEGQQFMPWYKFDENYAFLHRTLKEILRYLMDPDTFTFNFNNDPLVLRRRQTYLCYEVERLDNGTWVLMDQHMGFLCNEAKNLLCGFYGRHAELRFLDLVPSLQLDPAQIYRVTWFISWSPCFSWGCAGEVRAFLQENTHVRLRIFAARIYDYDPLYKEALQMLRDAGAQVSIMTYDEFEYCWDTFVYRQGCPFQPWDGLEEHSQALSGRLRAILQNQGN

SEQ ID NO: 42 - protein, 395 aa, Rattus sp.
  REGION 1..395: note = MISC_FEATURE - Rat APOBEC-3B polypeptide sequence
MQPQGLGPNAGMGPVCLGCSHRRPYSPIRNPLKKLYQQTFYFHFKNVRYAWGRKNNFLCYEVNGMDCALPVPLRQGVFRKQGHIHAELCFIYWFHDKVLRVLSPMEEFKVTWYMSWSPCSKCAEQVARFLAAHRNLSLAIFSSRLYYYLRNPNYQQKLCRLIQEGVHVAAMDLPEFKKCWNKFVDNDGQPFRPWMRLRINFSFYDCKLQEIFSRMNLLREDVFYLQFNNSHRVKPVQNRYYRRKSYLCYQLERANGQEPLKGYLLYKKGEQHVEILFLEKMRSMELSQVRITCYLTWSPCPNCARQLAAFKKDHPDLILRIYTSRLYFWRKKFQKGLCTLWRSGIHVDVMDLPQFADCWTNFVNPQRPFRPWNELEKNSWRIQRRLRRIKESWGL

SEQ ID NO: 43 - protein, 226 aa, Bos taurus
  REGION 1..226: note = MISC_FEATURE - Bovine APOBEC-3B polypeptide sequence
DGWEVAFRSGTVLKAGVLGVSMTEGWAGSGHPGQGACVWTPGTRNTMNLLREVLFKQQFGNQPRVPAPYYRRKTYLCYQLKQRNDLTLDRGCFRNKKQRHAERFIDKINSLDLNPSQSYKIICYITWSPCPNCANELVNFITRNNHLKLEIFASRLYFHWIKSFKMGLQDLQNAGISVAVMTHTEFEDCWEQFVDNQSRPFQPWDKLEQYSASIRRRLQRILTAPI

SEQ ID NO: 44 - protein, 490 aa, Pan troglodytes
  REGION 1..490: note = MISC_FEATURE - Chimpanzee APOBEC-3B polypeptide sequence
MNPQIRNPMEWMYQRTFYYNFENEPILYGRSYTWLCYEVKIRRGHSNLLWDTGVFRGQMYSQPEHHAEMCFLSWFCGNQLSAYKCFQITWFVSWTPCPDCVAKLAKFLAEHPNVTLTISAARLYYYWERDYRRALCRLSQAGARVKIMDDEEFAYCWENFVYNEGQPFMPWYKFDDNYAFLHRTLKEIIRHLMDPDTFTFNFNNDPLVLRRHQTYLCYEVERLDNGTWVLMDQHMGFLCNEAKNLLCGFYGRHAELRFLDLVPSLQLDPAQIYRVTWFISWSPCFSWGCAGQVRAFLQENTHVRLRIFAARIYDYDPLYKEALQMLRDAGAQVSIMTYDEFEYCWDTFVYRQGCPFQPWDGLEEHSQALSGRLRAILQVRASSLCMVPHRPPPPPQSPGPCLPLCSEPPLGSLLPTGRPAPSLPFLLTASFSFPPPASLPPLPSLSLSPGHLPVPSFHSLTSCSIQPPCSSRIRETEGWASVSKEGRDLG

SEQ ID NO: 45 - protein, 190 aa, Homo sapiens
  REGION 1..190: note = MISC_FEATURE - Human APOBEC-3C polypeptide sequence
  REGION 65..100: note = MISC_FEATURE - Nucleic acid editing domain
MNPQIRNPMKAMYPGTFYFQFKNLWEANDRNETWLCFTVEGIKRRSVVSWKTGVFRNQVDSETHCHAERCFLSWFCDDILSPNTKYQVTWYTSWSPCPDCAGEVAEFLARHSNVNLTIFTARLYYFQYPCYQEGLRSLSQEGVAVEIMDYEDFKYCWENFVYNDNEPFKPWKGLKTNFRLLKRRLRESLQ

SEQ ID NO: 46 - protein, 190 aa, Gorilla sp.
  REGION 1..190: note = MISC_FEATURE - Gorilla APOBEC-3C polypeptide sequence
  REGION 65..100: note = MISC_FEATURE - Nucleic acid editing domain
MNPQIRNPMKAMYPGTFYFQFKNLWEANDRNETWLCFTVEGIKRRSVVSWKTGVFRNQVDSETHCHAERCFLSWECDDILSPNTNYQVTWYTSWSPCPECAGEVAEFLARHSNVNLTIFTARLYYFQDTDYQEGLRSLSQEGVAVKIMDYKDFKYCWENFVYNDDEPFKPWKGLKYNFRFLKRRLQEILE

SEQ ID NO: 47 - protein, 202 aa, Macaca mulatta
  REGION 1..202: note = MISC_FEATURE - Rhesus macaque APOBEC-3A polypeptide sequence
  REGION 72..103: note = MISC_FEATURE - Nucleic acid editing domain
MDGSPASRPRHLMDPNTFTFNFNNDLSVRGRHQTYLCYEVERLDNGTWVPMDERRGFLCNKAKNVPCGDYGCHVELRFLCEVPSWQLDPAQTYRVTWFISWSPCFRRGCAGQVRVFLQENKHVRLRIFAARIYDYDPLYQEALRTLRDAGAQVSIMTYEEFKHCWDTFVDRQGRPFQPWDGLDEHSQALSGRLRAILQNQGN

SEQ ID NO: 48 - protein, 185 aa, Bos taurus
  REGION 1..185: note = MISC_FEATURE - Bovine APOBEC-3A polypeptide sequence
  REGION 56..86: note = MISC_FEATURE - Nucleic acid editing domain
MDEYTFTENFNNQGWPSKTYLCYEMERLDGDATIPLDEYKGFVRNKGLDQPEKPCHAELYFLGKIHSWNLDRNQHYRLTCFISWSPCYDCAQKLTTFLKENHHISLHILASRIYTHNRFGCHQSGLCELQAAGARITIMTFEDFKHCWETFVDHKGKPFQPWEGLNVKSQALCTELQAILKTQQN

SEQ ID NO: 49 - protein, 200 aa, Homo sapiens
  REGION 1..200: note = MISC_FEATURE - Human APOBEC-3H polypeptide sequence
  REGION 54..88: note = MISC_FEATURE - Nucleic acid editing domain
MALLTAETFRLQFNNKRRLRRPYYPRKALLCYQLTPQNGSTPTRGYFENKKKCHAEICFINEIKSMGLDETQCYQVTCYLTWSPCSSCAWELVDFIKAHDHLNLGIFASRLYYHWCKPQQKGLRLLCGSQVPVEVMGFPKFADCWENFVDHEKPLSFNPYKMLEELDKNSRAIKRRLERIKIPGVRAQGRYMDILCDAEV

SEQ ID NO: 50 - protein, 210 aa, Macaca mulatta
  REGION 1..210: note = MISC_FEATURE - Rhesus macaque APOBEC-3H polypeptide sequence
MALLTAKTFSLQFNNKRRVNKPYYPRKALLCYQLTPQNGSTPTRGHLKNKKKDHAEIRFINKIKSMGLDETQCYQVTCYLTWSPCPSCAGELVDFIKAHRHLNLRIFASRLYYHWRPNYQEGLLLLCGSQVPVEVMGLPEFTDCWENFVDHKEPPSFNPSEKLEELDKNSQAIKRRLERIKSRSVDVLENGLRSLQLGPVTPSSSIRNSR

SEQ ID NO: 51 - protein, 386 aa, Homo sapiens
  REGION 1..386: note = MISC_FEATURE - Human APOBEC-3D polypeptide sequence
  REGION 78..109: note = MISC_FEATURE - Nucleic acid editing domain
  REGION 262..296: note = MISC_FEATURE - Nucleic acid editing domain
MNPQIRNPMERMYRDTFYDNFENEPILYGRSYTWLCYEVKIKRGRSNLLWDTGVFRGPVLPKRQSNHRQEVYFRFENHAEMCFLSWFCGNRLPANRRFQITWFVSWNPCLPCVVKVTKFLAEHPNVTLTISAARLYYYRDRDWRWVLLRLHKAGARVKIMDYEDFAYCWENFVCNEGQPFMPWYKFDDNYASLHRTLKEILRNPMEAMYPHIFYFHFKNLLKACGRNESWLCFTMEVTKHHSAVFRKRGVFRNQVDPETHCHAERCFLSWFCDDILSPNTNYEVTWYTSWSPCPECAGEVAEFLARHSNVNLTIFTARLCYFWDTDYQEGLCSLSQEGASVKIMGYKDFVSCWKNFVYSDDEPFKPWKGLQTNFRLLKRRLREILQ

SEQ ID NO: 52 - protein, 236 aa, Homo sapiens
  REGION 1..236: note = MISC_FEATURE - Human APOBEC-1 polypeptide sequence
MTSEKGPSTGDPTLRRRIEPWEFDVFYDPRELRKEACLLYEIKWGMSRKIWRSSGKNTTNHVEVNFIKKFTSERDFHPSMSCSITWFLSWSPCWECSQAIREFLSRHPGVTLVIYVARLFWHMDQQNRQGLRDLVNSGVTIQIMRASEYYHCWRNFVNYPPGDEAHWPQYPPLWMMLYALELHCIILSLPPCLKISRRWQNHLTFFRLHLQNCHYQTIPPHILLATGLIHPSVAWR

SEQ ID NO: 53 - protein, 229 aa, Mus musculus
  REGION 1..229: note = MISC_FEATURE - Mouse APOBEC-1 polypeptide sequence
MSSETGPVAVDPTLRRRIEPHEFEVFFDPRELRKETCLLYEINWGGRHSVWRHTSQNTSNHVEVNFLEKFTTERYFRPNTRCSITWFLSWSPCGECSRAITEFLSRHPYVTLFIYIARLYHHTDQRNRQGLRDLISSGVTIQIMTEQEYCYCWRNFVNYPPSNEAYWPRYPHLWVKLYVLELYCIILGLPPCLKILRRKQPQLTFFTITLQTCHYQRIPPHLLWATGLK

SEQ ID NO: 54 - protein, 224 aa, Homo sapiens
  REGION 1..224: note = MISC_FEATURE - Human APOBEC-2 polypeptide sequence
MAQKEEAAVATEAASQNGEDLENLDDPEKLKELIELPPFEIVTGERLPANFFKFQFRNVEYSSGRNKTFLCYVVEAQGKGGQVQASRGYLEDEHAAAHAEEAFFNTILPAFDPALRYNVTWYVSSSPCAACADRIIKTLSKTKNLRLLILVGRLFMWEEPEIQAALKKLKEAGCKLRIMKPQDFEYVWQNFVEQEEGESKAFQPWEDIQENFLYYEEKLADILK

SEQ ID NO: 55 - protein, 224 aa, Mus musculus
  REGION 1..224: note = MISC_FEATURE - Mouse APOBEC-2 polypeptide sequence
MAQKEEAAEAAAPASQNGDDLENLEDPEKLKELIDLPPFEIVTGVRLPVNFFKFQFRNVEYSSGRNKTFLCYVVEVQSKGGQAQATQGYLEDEHAGAHAEEAFFNTILPAFDPALKYNVTWYVSSSPCAACADRILKTLSKTKNLRLLILVSRLFMWEEPEVQAALKKLKEAGCKLRIMKPQDFEYIWQNFVEQEEGESKAFEPWEDIQENFLYYEEKLADILK

SEQ ID NO: 56 - protein, 224 aa, Rattus sp.
  REGION 1..224: note = MISC_FEATURE - Rat APOBEC-2 polypeptide sequence
MAQKEEAAEAAAPASQNGDDLENLEDPEKLKELIDLPPFEIVTGVRLPVNFFKFQFRNVEYSSGRNKTFLCYVVEAQSKGGQVQATQGYLEDEHAGAHAEEAFFNTILPAFDPALKYNVTWYVSSSPCAACADRILKTLSKTKNLRLLILVSRLFMWEEPEVQAALKKLKEAGCKLRIMKPQDFEYLWQNFVEQEEGESKAFEPWEDIQENFLYYEEKLADILK

SEQ ID NO: 57 - protein, 208 aa, Petromyzon marinus
  REGION 1..208: note = MISC_FEATURE - Petromyzon marinus CDA1 (pmCDAl) polypeptide sequence
MTDAEYVRIHEKLDIYTFKKQFFNNKKSVSHRCYVLFELKRRGERRACFWGYAVNKPQSGTERGIHAEIFSIRKVEEYLRDNPGQFTINWYSSWSPCADCAEKILEWYNQELRGNGHTLKIWACKLYYEKNARNQIGLWNLRDNGVGLNVMVSEHYQCCRKIFIQSSHNQLNENRWLEKTLKRAEKRRSELSFMIQVKILHTTKSPAV

SEQ ID NO: 58 - protein, 381 aa, Homo sapiens
  REGION 1..381: note = MISC_FEATURE - Human APOBEC3G D316R D317R polypeptide sequence
MKPHFRNTVERMYRDTFSYNFYNRPILSRRNTVWLCYEVKTKGPSRPPLDAKIFRGQVYSELKYHPEMRFFHWFSKWRKLHRDQEYEVTWYISWSPCTKCTRDMATFLAEDPKVTLTIFVARLYYFWDPDYQEALRSLCQKRDGPRATMKFNYDEFQHCWSKFVYSQRELFEPWNNLPKYYILLHFMLGEILRHSMDPPTFTFNFNNEPWVRGRHETYLCYEVERMHNDTWVLLNQRRGFLCNQAPHKHGFLEGRHAELCFLDVIPFWKLDLDQDYRVTCFTSWSPCFSCAQEMAKFISKKHVSLCIFTARIYRRQGRCQEGLRTLAEAGAKISFTYSEFKHCWDTFVDHQGCPFQPWDGLDEHSQDLSGRLRAILQNQEN

SEQ ID NO: 59 - protein, 182 aa, Homo sapiens
  REGION 1..182: note = MISC_FEATURE - Human APOBEC3G chain A polypeptide sequence
MDPPTFTFNFNNEPWWGRHETYLCYEVERMHNDTWVLLNQRRGFLCNQAPHKHGFLEGRHAELCFLDVIPFWKLDLDQDYRVTCFTSWSPCFSCAQEMAKFISKNKHVSLCIFTARIYDDQGRCQEGLRTLAEAGAKISFTYSEFKHCWDTFVDHQGCPFQPWDGLDEHSQDLSGRLRAILQ

SEQ ID NO: 60 - protein, 184 aa, Homo sapiens
  REGION 1..184: note = MISC_FEATURE - Human APOBEC3G chain A D120R D121R polypeptide sequence
MDPPTFTFNFNNEPWVRGRHETYLCYEVERMHNDTWVLLNQRRGFLCNQAPHKHGFLEGRHAELCFLDVIPFWKLDLDQDYRVTCFTSWSPCFSCAQEMAKFISKNKHVSLCIFTARIYRRQGRCQEGLRTLAEAGAKISFMTYSEFKHCWDTFVDHQGCPFQPWDGLDEHSQDLSGRLRAILQ

SEQ ID NO: 61 - protein, 367 aa, Homo sapiens
  REGION 1..367: note = MISC_FEATURE - hAPOBEC-4 polypeptide sequence
MEPIYEEYLANHGTIVKPYYWLSFSLDCSNCPYHIRTGEEARVSLTEFCQIFGFPYGTTFPQTKHLTFYELKTSSGSLVQKGHASSCTGNYIHPESMLFEMNGYLDSAIYNNDSIRHIILYSNNSPCNEANHCCISKMYNFLITYPGITLSIYFSQLYHTEMDFPASAWNREALRSLASLWPRVVLSPISGGIWHSVLHSFISGVSGSHVFQPILTGRALADRHNAYEINAITGVKPYFTDVLLQTKRNPNTKAQEALESYPLNNAFPGQFFQMPSGQLQPNLPPDLRAPVVFVLVPLRDLPPMHMGQNPNKPRNIVRHLNMPQMSFQETKDLGRLPTGRSVEIVEITEQFASSKEADEKKKKKGKK

SEQ ID NO: 62 - protein, 388 aa, Rattus norvegicus
  REGION 1..388: note = MISC_FEATURE - rAPOBEC-4 polypeptide sequence
MEPLYEEYLTHSGTIVKPYYWLSVSLNCTNCPYHIRTGEEARVPYTEFHQTFGFPWSTYPQTKHLTFYELRSSSGNLIQKGLASNCTGSHTHPESMLFERDGYLDSLIFHDSNIRHIILYSNNSPCDEANHCCISKMYNFLMNYPEVTLSVFFSQLYHTENQFPTSAWNREALRGLASLWPQVTLSAISGGIWQSILETFVSGISEGLTAVRPFTAGRTLTDRYNAYEINCITEVKPYFTDALHSWQKENQDQKVWAASENQPLHNTTPAQWQPDMSQDCRTPAVFMLVPYRDLPPIHVNPSPQKPRTVVRHLNTLQLSASKVKALRKSPSGRPVKKEEARKGSTRSQEANETNKSKWKKQTLFIKSNICHLLEREQKKIGILSSWSV

SEQ ID NO: 63 - protein, 363 aa, Macaca fascicularis
  REGION 1..363: note = MISC_FEATURE - mfAPOBEC-4 polypeptide sequence
MEPTYEEYLANHGTIVKPYYWLSFSLDCSNCPYHIRTGEEARVSLTEFCQIFGFPYGTTYPQTKHLTFYELKTSSGSLVQKGHASSCTGNYIHPESMLFEMNGYLDSAIYNNDSIRHIILYCNNSPCNEANHCCISKVYNFLITYPGITLSIYFSQLYHTEMDFPASAWNREALRSLASLWPRVVLSPISGGIWHSVLHSFVSGVSGSHVFQPILTGRALTDRYNAYEINAITGVKPFFTDVLLHTKRNPNTKAQMALESYPLNNAFPGQSFQMTSGIPPDLRAPVVFVLLPLRDLPPMHMGQDPNKPRNIIRHLNMPQMSFQETKDLERLPTRRSVETVEITERFASSKQAEEKTKKKKGKK

SEQ ID NO: 64 - protein, 218 aa, Rattus norvegicus
  REGION 1..218: note = MISC_FEATURE - rAPOBEC-1 (delta 177-186) polypeptide sequence
MSSETGPVAVDPTLRRRIEPHEFEVFFDPRELRKETCLLYEINWGGRHSIWRHTSQNTNKHVEVNFIEKFTTERYFCPNTRCSITWFLSWSPCGECSRAITEFLSRYPHVTLFIYIARLYHHADPRNRQGLRDLISSGVTIQIMTEQESGYCWRNFVNYSPSNEAHWPRYPHLWVRGLPPCLNILRRKQPQLTFFTIALQSCHYQRLPPHILWATGLK

SEQ ID NO: 65 - protein, 218 aa, Rattus norvegicus
  REGION 1..218: note = MISC_FEATURE - rAPOBEC-1 (delta 202-213) polypeptide sequence
MSSETGPVAVDPTLRRRIEPHEFEVFFDPRELRKETCLLYEINWGGRHSIWRHTSQNTNKHVEVNFIEKFTTERYFCPNTRCSITWFLSWSPCGECSRAITEFLSRYPHVTLFIYIARLYHHADPRNRQGLRDLISSGVTIQIMTEQESGYCWRNFVNYSPSNEAHWPRYPHLWVRLYVLELYCIILGLPPCLNILRRKQPQHYQRLPPHILWATGLK

SEQ ID NO: 66 - protein, 198 aa, Mus musculus
  REGION 1..198: note = MISC_FEATURE - mouse cytidine deaminase polypeptide sequence
  REGION 1..30: note = MISC_FEATURE - Nuclear localization sequence
  REGION 183..198: note = MISC_FEATURE - Nuclear export signal
MDSLLMKQKKFLYHFKNVRWAKGRHETYLCYVVKRRDSATSCSLDFGHLRNKSGCHVELLFLRYISDWDLDPGRCYRVTWFTSWSPCYDCARHVAEFLRWNPNLSLRIFTARLYFCEDRKAEPEGLRRLHRAGVQIGIMTFKDYFYCWNTFVENRERTFKAWEGLHENSVRLTRQLRRILLPLYEVDDLRDAFRMLGF

SEQ ID NO: 67 - protein, 224 aa, Petromyzon marinus
  REGION 1..224: note = MISC_FEATURE - pmCDA-1 polypeptide sequence
MAGYECVRVSEKLDFDTFEFQFENLHYATERHRTYVIFDVKPQSAGGRSRRLWGYIINNPNVCHAELILMSMIDRHLESNPGVYAMTWYMSWSPCANCSSKLNPWLKNLLEEQGHTLTMHFSRIYDRDREGDHRGLRGLKHVSNSFRMGVVGRAEVKECLAEYVEASRRTLTWLDTTESMAAKMRRKLFCILVRCAGMRESGIPLHLFTLQTPLLSGRVVWWRV

SEQ ID NO: 68 - protein, 331 aa, Petromyzon marinus
  REGION 1..331: note = MISC_FEATURE - pmCDA-2 polypeptide sequence
MELREVVDCALASCVRHEPLSRVAFLRCFAAPSQKPRGTVILFYVEGAGRGVTGGHAVNYNKQGTSIHAEVLLLSAVRAALLRRRRCEDGEEATRGCTLHCYSTYSPCRDCVEYIQEFGASTGVRVVIHCCRLYELDVNRRRSEAEGVLRSLSRLGRDFRLMGPRDAIALLLGGRLANTADGESGASGNAWVTETNVVEPLVDMTGFGDEDLHAQVQRNKQIREAYANYASAVSLMLGELHVDPDKFPFLAEFLAQTSVEPSGTPRETRGRPRGASSRGPEIGRQRPADFERALGAYGLFLHPRIVSREADREEIKRDLIVVMRKHNYQGP

SEQ ID NO: 69 - protein, 209 aa, Petromyzon marinus
  REGION 1..209: note = MISC_FEATURE - pmCDA-5 polypeptide sequence
MAGDENVRVSEKLDFDTFEFQFENLHYATERHRTYVIFDVKPQSAGGRSRRLWGYIINNPNVCHAELILMSMIDRHLESNPGVYAMTWYMSWSPCANCSSKLNPWLKNLLEEQGHTLMMHFSRIYDRDREGDHRGLRGLKHVSNSFRMGVVGRAEVKECLAEYVEASRRTLTWLDTTESMAAKMRRKLFCILVRCAGMRESGMPLHLFT

SEQ ID NO: 70 - protein, 158 aa, Saccharomyces cerevisiae
  REGION 1..158: note = MISC_FEATURE - yCD polypeptide sequence
MVTGGMASKWDQKGMDIAYEEAALGYKEGGVPIGGCLINNKDGSVLGRGHNMRFQKGSATLHGEISTLENCGRLEGKVYKDTTLYTTLSPCDMCTGAIIMYGIPRCVVGENVNFKSKGEKYLQTRGHEVVVVDDERCKKIMKQFIDERPQDWFEDIGE

SEQ ID NO: 71 - protein, 194 aa, synthetic construct
  REGION 1..194: note = Description of artificial sequence: cytidine deaminase polypeptide sequence
MKPQIRDHRPNPMEAMYPHIFYFHFENLEKAYGRNETWLCFTVEIIKQYLPVPWKKGVFRNQVDPETHCHAEKCFLSWFCNNTLSPKKNYQVTWYTSWSPCPECAGEVAEFLAEHSNVKLTIYTARLYYFWDTDYQEGLRSLSEEGASVEIMDYEDFQYCWENFVYDDGEPFKRWKGLKYNFQSLTRRLREILQ

SEQ ID NO: 72 - protein, 192 aa, synthetic construct
  REGION 1..192: note = Description of artificial sequence: cytidine deaminase polypeptide sequence
MADSSEKMRGQYISRDTFEKNYKPIDGTKEAHLLCEIKWGKYGKPWLHWCQNQRMNIHAEDYFMNNIFKAKKHPVHCYVTWYLSWSPCADCASKIVKFLEERPYLKLTIYVAQLYYHTEEENRKGLRLLRSKKVIIRVMDISDYNYCWKVFVSNQNGNEDYWPLQFDPWVKENYSRLLDIFWESKCRSPNPW

SEQ ID NO: 73 - protein, 280 aa, synthetic construct
  REGION 1..280: note = Description of artificial sequence: cytidine deaminase polypeptide sequence
MDPQRLRQWPGPGPASRGGYGQRPRIRNPEEWFHELSPRTFSFHFRNLRFASGRNRSYICCQVEGKNCFFQGIFQNQVPPDPPCHAELCFLSWFQSWGLSPDEHYYVTWFISWSPCCECAAKVAQFLEENRNVSLSLSAARLYYFWKSESREGLRRLSDLGAQVGIMSFQDFQHCWNNFVHNLGMPFQPWKKLHKNYQRLVTELKQILREEPATYGSPQAQGKVRIGSTAAGLRHSHSHTRSEAHLRPNHSSRQHRILNPPREARARTCVLVDASWICYR

SEQ ID NO: 74 - protein, 555 aa, synthetic construct
  REGION 1..555: note = Description of artificial sequence: pYY-BEM3.1; tr|F7B644|F7B644_HORSE polypeptide sequence
MPRGRARERQRRNPMEKLDAEAFSFHFLNMEFVYDRNCSYLCYQVEGRLSGSPVLSEQGVFPNEVCGKTRRHAELCFLDWFRGRLSPDEYYCVTWFISWSPCSNCAREVAEFLKRHRNVELSIFAARLYYCRDHEQGLQSLCNRGAQLAVMLRKDFTYCWDNFVHNSGREFSPWENIDANSDLLARKLEDLLKNPMEKLHRKTFSFHFRNLKFAKGRKCSYLCYRVEGRLSGSPGLSEQGVFLNEVCDENCRHAELCFLHWFRGRLSPHADYRVTWFISWSPCSNCAREVAEFLKQHRNVELHISAARLYYWQRNKPGLRNLRSSGAQLAIMFFWDFRDCWDNFVHNSGRHFIPWKKINVNSRLLATKLEDLLKNPLEKLHPNTFSFHFCNLEFAYDRKYSYLCYQVEGRLSGSPGLSEQGVFLNEVCGKTRCHAELCFLDWFRVRLSPDEYYRVTWFISWSPCFYCAREVADFLKQYRNVKLSIFAARLYYCRDHAQGLRSLCSSGAQLAIMFFWDFRYCWDNFVHNSGREFRPWKKINVNSRLLATKLEDILK

SEQ ID NO: 75 - protein, 437 aa, synthetic construct
  REGION 1..437: note = Description of artificial sequence: pYY-BEM3.2; tr|D1LZA1|D1LZA1_PANTI polypeptide sequence
MEPWRPSPRNPMDRIDPKTFRFQFPNLRYASGRKLCYLCFQVERDYFYYNDSDWGVFRNEVHPWAPCHAEQCFLSWFRDQYPYRDEDYNVTWFLSWSPCPTCAEEVVEFLEEYRNLTLSIFTSRLYYFWHPNYQEGLCKLWDAGVQLDIMSCDEFEYCWDNFVYHKGMRFQRRNLLKDYDFLAAKLQEILSPGQQRKRDWPFPPRPGAQVDPRSWVQEVTEPGINTRRHPLHLLVSFLLPRPTMNPLQEDIFYRQFGNQHRVPKPYYYRRKTYLCYQLKLPEGTLIDKDCLRNKKKRHAEICFIDKIKSLTRDTSQRFEIICYITWSPCPFCAEELVAFVKDNPHLSLRIFASRLYVHWRWKYQQGLRHLHASGIPVAVMSLPEFEDCWRNFVDHQDRLFQPWRNLDQYSESIKRRLGKILTPLNDLRNDFRNLKLE

SEQ ID NO: 76 - protein, 440 aa, synthetic construct
  REGION 1..440: note = Description of artificial sequence: pYY-BEM3.3; tr|A0A3Q0DM17|A0A3Q0DM17_TARSY polypeptide sequence
MPMKRMYSNIYFDHFNNQRLLSGQNAPWLCFKVERVENCMLVPLETGVFGNQVSGCCGKTERPVEPTSLTRSVLVSPNPGTELRAQQPSRKGHLGKLGCVEYPSPGLALVMLGYGASTYCPDSSMYCPETCHHPEMCFLYWFEKTLSHEEQYQITWYVSWSPCVNCAEEVAEFLSVHPKVNLTIYAARLYCYQKLNHRQGLRRLCKEGACVKIMNYEEFDHCWENFVYNNYKSFKPWVKLQDNYELLATELDKILRIPMERMPQKKFRFHFQNLIAKDRNTTWLCFEVKNVRKKHPPDLLERGIFQNQVTPRINCHAEMCFLSWFLENMLLHGKRYQVTWYISWSPCSICAEEVAEFLSAHPKVSLTIYAARLYYFWVPGYRQGLRRLVEEGARVEIMNYEEFDYCWENFVSINNEPFQPWEGLHEKYGYLVTKLNNILG

SEQ ID NO: 77 - protein, 453 aa, synthetic construct
  REGION 1..453: note = Description of artificial sequence: pYY-BEM3.4; tr|A0A3Q0DNJ5|A0A3Q0DNJ5_TARSY polypeptide sequence
MEDNPEPRPRQQMDQDTFIFNFNNDPSVRGRHQTFLCYEVEHLDDDTWVPQDKYLGFLHNQPQSRSNAYCAYHAELCFLELVSSWQLDPAQRYRVTCFISWSPCSSCAQEVAAFLKKNRHVTLRILAARIYDYYQGYEDGLRTLQGVGVDITVMTSAEFGHCWNTFVDHQGSPFQPWEGLDQHSQVIWQRMQDILQVIPAKYLMEKVKYTVTVDILFKGRVPGPRYLMDQNTFTRNFINNLSVSGRRQTLLCYEVERLGGDIWVPLDQLRGFLLSQARDVLNYYQGRHAEPCFLDLVSSWQLDPAQHYRVTWFISWSPCTSCAQAVAAFLRENRHVTLRILAARIYDYHQGYEEGLRTLQRTGAHIDIMTFKEFGHCWNTFVNHKGSPFKSWTGLDQHSQALRKRLQDILHTMASSLWDQSEPKKPIPSQEVTLPESIPPSHGNRFRLVKRPS

SEQ ID NO: 78 - protein, 424 aa, synthetic construct
  REGION 1..424: note = Description of artificial sequence: pYY-BEM3.5; tr|G5AYU5|G5AYU5_HETGA polypeptide sequence
FCFLSCVHRKPIERIYKKAFRFYFRNLRCAYGRNKTFLCYEVKRERDNKVLHKGVVLNQVEPYMPLHAELRFLSWFHDTLLCPLGSYQVTLYVSWSPCSECAEELTTFLAGHRNVTMTIYVAQLYYCNWKSPNREGLKILIAEDARLRVMFYDEFLYCWRNFVKNDYNNFDPWSLLDENSRYHNRILQNILKGWGRPHRVGPEGEQTATPGGSGGHCISVFSLLRRREMTLKEETFRVQFNNAYKAPKPYRRRVTYLCYQLQEANGDPLTKGCLRTKKGYHAESRFIKRICSMDLGQDQSYQVTCFLTWSPCPHCAQELVSFKRAHPHLRLQIFTARLFFHWKRSYQEGLQRLCRAQVPVAVMGHPEFAYCWDNFVDHQPGPFEPPWAKLEYYSSCLKRRLQQILRSWGVDDLTNDFRNLQLGP

SEQ ID NO: 79 - protein, 385 aa, synthetic construct
  REGION 1..385: note = Description of artificial sequence: pYY-BEM3.6; tr|A0A2Y9QMV5|A0A2Y9QMV5_TRIMA polypeptide sequence
MLSSPQTPGTRKPMKTLAPDEFSFNFENLRLAHGRNTTFLCFQVETKAPPSLNSPDSGIFQNQDHCPSHHHAEMVFLTWFQKRLSPAQHYEVTWYMSWSPCSRCAVQVAKFLKSNSTVNLSIFVARLYYPRELETKDGLHSLWQAGAQVQIMFFQDFKYCWENFVNNEGKPFQPWKNLDENSKDWDTELKDIHRNTTDLLTEEMFYSQFYNREKKSSIPRKTYLCYQLNEPQPVKRCLHYKKGYHAVTRFIDGIVSMNLDPARSYDITCYFTWSPCNRYARKLVSFIEDYPNLRLKVYTSRLYFHWCWTNMQGLQHLQNSRVTVAVMTFRDFEYCWKNFVDNQGKPFEPWEKLDLYSQSTERRLRRILKPLTPDVLNEDFGNLHL

SEQ ID NO: 80 - protein, 381 aa, synthetic construct
  REGION 1..381: note = Description of artificial sequence: pYY-BEM3.7; tr|H0XHI0|H0XHI0_OTOGA polypeptide sequence
LSCAFRDPMNRMYPKTFCQNFEKEPCPSNQNSSWLCFEVETKNSAVFFHRGVFRNQPAPPPRAPTSVLLSQGPVKTPCHAEECFLTWIQGVLPPDHHYHVTWYVSRGPCANCANLIVHFLAMHRRVTLTIFAAHLNFFWESDFQQGLLRMDQEGVQLHIMGYEEFEYCWDNFVYNQRKQFVPWNGLNENYEFMVSTLEDILRSPLDRIRQKDFSIHFRNSLWLDDKSTWLCFEVKRTKSPVPLYRGVFRNQSPPKTPCHAEVRFFTWLQDLPPDFCCQFTWYLSWSPCADCADLVANFLAKHRNVSLTIFVARLYYYRDPEMHRGLRRMYQEGANVDIMSVIEFEYCWDNFVYNQGKQFVPWNGLNENYEFLVPRLQEILE

SEQ ID NO: 81 - protein, 337 aa, synthetic construct
  REGION 1..337: note = Description of artificial sequence: pYY-BEM3.8; tr|A0A3M0K4Y7|A0A3M0K4Y7_HIRRU polypeptide sequence
MYISKKALRRHFDPRVYPRETYLLCELQWEGSRRVWIHWIRNVPDHHAEEYFLEEVFEPRNYGFCNITLYLSWSPCCTCCSKIRDFLKRNPNVKIDIRVARLIYPDYAETRSSLRELNGLQRVSIQVMEAAGLSCIESKNHRISQVERDPKGSSSPTLFTLQDHLKLSNMTESVIQDSVSIQICYQMRILGFQCHIRWKLQPEDFQRNYSPNQIGRVVYLLYEVRWRRGSIWRNWCSNNPEQHAEVNFLENHFHHRPQTPCSITWFLSTSPCGKCSRRILEFLKSQPNVTLEIYAAKLFRHHDIRNRQGLRNLMMNGVTIYIMNLEGNPASLCLSVD

SEQ ID NO: 82 - protein, 237 aa, synthetic construct
  REGION 1..237: note = Description of artificial sequence: pYY-BEM3.9; tr|A0A3P4LUZ8|A0A3P4LUZ8_GULGU polypeptide sequence
MSFEDYEYCWETFVDHKGMYFQSWDLLRDNDLLAAELKNILRSTMNPLRQEIFYHQFGNQPRAPRPYHRRKTYLCYQLQPHEGPITARVCLQNKKKRHAEIRFIDNIRALRLDRSQTFEITCYLTWSPCPTCAKALAVFVQDHPHISLRLFASRLFIHWCWKYQEGLRLLHRSRIPVAVMRLQEFEDCWRNFVDNQDEPFQPWNKLEQYSESITRRLRRILGHPQNNLENDFRNLHI

SEQ ID NO: 83 - protein, 221 aa, synthetic construct
  REGION 1..221: note = Description of artificial sequence: pYY-BEM3.10; tr|G5BPM8|G5BPM8_HETGA polypeptide sequence
RRRIEPWQFEASFDPRQLRRETCLLSEVRWGTSPRAWRGCSLNTARHAEVSFMDRLTSEGRLRGPVRCSITWFLSWSPCGACAQAIGEFLRQHPNVSLVIYIARLFWHVDEQNRQGLRDLVTRGVRMQVMSDPEFAHCWRNFVNYSPGQEARWPQVPPVWTWLYSLELHCILLNLPPCLKISRRHHNQLTFFQLILQNCHYQAIPSPVLLASGLIHPFVTW

SEQ ID NO: 84 - protein, 211 aa, synthetic construct
  REGION 1..211: note = Description of artificial sequence: pYY-BEM3.11; tr|H2M862|H2M862_ORYLA polypeptide sequence
MITKLDSVLLPKKKFIYHYKNMRWARGRHETYLCFVVKRRVGPESLSFDFGHLRNRNGCHVELLFLRHLSALCPGLWGYGATGQGRVSYSITWFCSWSPCANCSFRLAQFLSQTPNLRLRIFVSRLYFCDLEDSREREGLRMLKKVGVHITVMSYKDYFYCWQTFVARKQSKFKPWDGLHQNSVRLSRKLNRILQPCETEDFRDAFKLLGL

SEQ ID NO: 85 - protein, 353 aa, synthetic construct
  REGION 1..353: note = Description of artificial sequence: pYY-BEM3.12; tr|H0Y0C6|H0Y0C6_OTOGA polypeptide sequence
MYLKTFYRHFNNRPYLSRRNDTWLCFEVKTTSSNSPGSFYSGVFRNQGPRYCPWHTELCFLTWVRPIVSHHHFYQITWYMSWSPCANCAWQVATFLATHENVSLTNYTVRIYYFWRQDYRQGLLRMIEEGTQVYVMSSKEFQHCWENFVDHWGTRWVTCWNRLKKNYEFLVTRLSEILSDPKERISPNTFYNQFNNTPVPRGRKDTWLCFEVKEKNSNSPGSFHRGVFQNQVFSGTSSHARRCPPDHHYEVTWYTSWSPCAHCAWHVVNFLTSNPNVSLTIFAARLYYIYRPEIQQGLRRVFQEGAKVHIMSLKEFKYCWAKLVYNSGMRFMPWYQFNFNFLFPNTTLKGDLH

SEQ ID NO: 86 - protein, 189 aa, synthetic construct
  REGION 1..189: note = Description of artificial sequence: pYY-BEM3.13; tr|A0A3Q2Z5X6|A0A3Q2Z5X6_HIPCM polypeptide sequence
MDVHFMNFIYHYKNMRWAKGRNETYLCFVVKRRVGPNSLTFDFGHLRNRNGCHVELLFLRYLGRRLSYSITWFCSWSPCANCSAALSQFLSRMPNLRLRIFVARLYFCDMEDSHEREGLRLLQKAGVQVTVMSYKDYYYCWQTFVDRKKSHFKAWEDLHQNSVRLSRKLNRILQPCEMDLRDAFKLLGL

SEQ ID NO: 87 - protein, 190 aa, synthetic construct
  REGION 1..190: note = Description of artificial sequence: pYY-BEM3.15; tr|A0A2K6NY90|A0A2K6NY90_RHIRO polypeptide sequence
MNPHIRNPMEAMYPGTFYFHFKNLWEADNRNESWLCFAVEVIKHHSTVSWKRGVFRNQVDPETHCHAEKCFLSWFCDNTLSPKKNYQVTWYTSWSPCPECAREVAKFLARHSNVMLTIYTARLYYSQYPNYQEGLRRLNEEGVPVEIMDYEDFKYCWENFVYNGDELFKPWKGLKYNFLFLDSKLQEILE

SEQ ID NO: 88 - protein, 202 aa, synthetic construct
  REGION 1..202: note = Description of artificial sequence: pYY-BEM3.16; tr|Q6ICH2|Q6ICH2_HUMAN polypeptide sequence
MNPQIRNPMERMYRDTFYDNFENEPILYGRSYTWLCYEVKIKRGRSNLLWDTGVFRGPVLPKRQSNHRQEVDPETHCHAERCFLSWFCDDILSPNTNYEVTWYTSWSPCPECAGEVAEFLARHSNVNLTIFTARLCYFWDTDYQEGLCSLSQEGASVKIMGYKDFVSCWKNFVYSDDEPFKPWKGLQTNFRLLKRRLREILQ

SEQ ID NO: 89 - protein, 202 aa, synthetic construct
  REGION 1..202: note = Description of artificial sequence: pYY-BEM3.17; tr|G8GPV1|G8GPV1_CERNE polypeptide sequence
MDGSPASRPGHVMDPGTFTSNFNNKPWVSGQRETYLCYKVERSHNDTWVLLNQHRGFLRNQAKNRLHGDYGCHAELCFLGEVPSWRLDPTQTYRVTWFISWSPCFSGGCAEQVRAFLQENTHVRLRIFAARIYDYDFLYQEALRTLRDAGAQVSIMTYEEFKHCWDTFVDHQGRPFQPWDGLDEHSQALSGRLQAILQNQGN

SEQ ID NO: 90 - protein, 181 aa, synthetic construct
  REGION 1..181: note = Description of artificial sequence: pYY-BEM3.18; tr|Q1WBT6|Q1WBT6_SYMSY polypeptide sequence
MALLTAKTFRLQFNNKRRVTKPYYPRKALLCYQLTPQNGSTPTRGYFKNKKKRHAEIRFINKIKSMGLDETQCYQVTCYLTWSPCPSCAWELVDFIKAHDHLNLGIFASRLYYHWCRHQQEGLRLLCGSQVPVEVMGFPEFADCWENFVDHEEPLSFNPSEMLEELDKNSRAIKRRLEKIK

SEQ ID NO: 91 - protein, 211 aa, synthetic construct
  REGION 1..211: note = Description of artificial sequence: pYY-BEM3.19; tr|A0A3B4CS14|A0A3B4CS14_PYGNA polypeptide sequence
MDNTNRRKFIYHYKNVRWARGRHETYLCFVVKKRNSPDSLSFDFGHLRNRNGCHVELLFLRYIEVLCPGLWGSGVDGVRVSYAVTWFCSWSPCSNCAQRLTNFLSQTPNLRLRIFVARLYFCDEEDSLEREGLRHLQRAGVQITVMTYKDFFYCWQTFVASRERCFKAWEGLRQNSVRLSRKLNRILQVFISTPVISPLITTHLGQSWAGG

SEQ ID NO: 92 - protein, 315 aa, synthetic construct
  REGION 1..315: note = Description of artificial sequence: pYY-BEM3.20; tr|A0A087XZI4|A0A087XZI4_POEFO polypeptide sequence
RKVSYSVTWFCSWSPCANCSIRLAQFLHQTPNLRLRIFVSRLYFCDLEDSREREGLRILKKAGVHITVMSYKDYFYCWQTFVAKSQSKFKPWDGLHQNYIRLSRKLNRILQPALDIKKFIYHYKNLRWARGRCETYLCFVVKKKLHLFMFVIVGRNRLFDLNVTMNNKSLYLIPLHLQLLFLRHLGALCPGLWGYGVTGERKVSYSVTWFCSWSPCANCSIRLAQFLHQTPNLRLRIFVSRLYFCDLEDSREREGLRILKKAGVHITVMSYKDYFYCWQTFVAKSQSKFKPWDGLHQNYIRLSRKLNRILQVQFF

SEQ ID NO: 93 - protein, 189 aa, synthetic construct
  REGION 1..189: note = Description of artificial sequence: pYY-BEM3.21; tr|A0A341AEK4|A0A341AEK4_9CETA polypeptide sequence
MASDRGPSAGDATSRRRIEPWEFEVSFDPRELCKETRLLYEIKWGRSQHVWRHSGKNTTNHVECNFIEKFTSERPFHRSVSCCITWFLSWSPCWECSKAIREFLNQHPRVTLFIYVARLFQHMDPQNRQGLRDLIHSGVTIQIMGPTEYDYCWRNFVNYPPGKEAHWPRYPPPLMKLYALELHCIILVP

SEQ ID NO: 94 - protein, 180 aa, synthetic construct
  REGION 1..180: note = Description of artificial sequence: pYY-BEM3.22; tr|E2D879|E2D879_MUSMI polypeptide sequence
RNLISRETFNFNFENLCYAKGRKNTFLCYEVTRKDCDSPVSLCHGVFKNKGSIHAEICFLYWFHDKVLKVLTPREEFKVTWYMSWSPCFECAEQVVRFLATHHNLNLTIFSSRLYNVSDPDTQQKLCRLVQEGAQVAVMDLSEFKKCWEKFVDNDGQQFRPWKRLRTNFRYQNSKLQEIL

SEQ ID NO: 95 - protein, 221 aa, synthetic construct
  REGION 1..221: note = Description of artificial sequence: pYY-BEM3.23; tr|A0A2K5RDN6|A0A2K5RDN6_CEBCA polypeptide sequence
MWEAQSPGLSREWGSVAISPEDPGPLHIGRFLSCAFRHPMNAMYPGIFNFHFRNLRKAYGRNETWLCFTVEGIMNRSTVSWKSGVFRNQVGSDPFCHAEMCFLSWFRHNMLSPKKDYEVTWYASWSPCPECAGQVAEFLARHGNVRLTIFTAHLYYFWNPSFRQGLRRLSQEGASVLIMGYEDFEYCWDNFVYNDGQPFKPWKRLQDNSLSLYITLQEILQ

SEQ ID NO: 96 - protein, 206 aa, synthetic construct
  REGION 1..206: note = Description of artificial sequence: pYY-BEM3.24; tr|A0A2K5RDN7|A0A2K5RDN7_CEBCA polypeptide sequence
MEASPASRPRPLMGPRTFTENFTNNPEVFGRHQTYLCYEVKCQGPDGTRDLMTEQRDFLCNQARNLLSGFDGRHAERCFLDRVPSWRLDPAQTYRVTCFISWSPCFSCAREVAEFLQENPHVNLRIFAARIYDCRPRYEEGLQMLQNAGAQVSIMTSEEFRHCWDTFVDHQGHPFQPWEGLDEHSQALSRRLQAILQGNRWMILSL

SEQ ID NO: 97 - protein, 184 aa, synthetic construct
  REGION 1..184: note = Description of artificial sequence: pYY-BEM3.25; tr|A0A1C9CJ69|A0A1C9CJ69_CERAL polypeptide sequence
NPMKAMDPHIFYFHFKNLRKAYGRNETWLCFAVEIIKQRSTVPWRTGVFRNQVDPESHCHAERCFLSWFCEDILSPNTDYRVTWYTSWSPCLDCAGEVAEFLARHSNVELAIFAARLYYFWDTHYQQGLRSLSEKGASVEIMGYEDFKYCRENFVCDDGKPFKPWKGLKTNFRFLKRRLQEILE

SEQ ID NO: 98 - protein, 197 aa, synthetic construct
  REGION 1..197: note = Description of artificial sequence: pYY-BEM3.26; tr|A0A2R2Z4D2|A0A2R2Z4D2_PTEAL polypeptide sequence
MHLQVWRKVTEAWREGYTLKPWSRNPMERLYHDYFYFHFYNLPTPKHRNGCYICYQVEGTKKHSRMPLLRGVFENQESLDMMLSPGEKYRVTWYISWSPCFACVDEVIKFLREHTNVELIIFAARLYHSDILQYRQGLRKLHDAGVHVAIMSYYEFKHCLNDFVFHQGRSFCPWNDLNKNSKNLSNTLEDILRNQED

SEQ ID NO: 99 - protein, 206 aa, synthetic construct
  REGION 1..206: note = Description of artificial sequence: pYY-BEM3.27; tr|B7T161|B7T161_SHEEP polypeptide sequence
MTEGWAGSGLPGRGDCVWTPQTRNTMNLLRETLFKQQFGNQPRVPPPYYRRKTYLCYQLKELDDLMLDKGCFRNKKQRHAEIRFIDKINSLNLNPSQSYKIICYITWSPCPNCASELVDFITRNDHLNLQIFASRLYFHWIKPFCRGLHQLQKAGISVAVMTHTEFEDCWEQFVDNQLRPFQPWDKLEQYSASIRRRLQRILTAPT

SEQ ID NO: 100 - protein, 205 aa, synthetic construct
  REGION 1..205: note = Description of artificial sequence: pYY-BEM3.28; tr|A0A2R2X2G4|A0A2R2X2G4_PTEAL polypeptide sequence
MAGLGQACEGCCGQMPEISYPMGRLDPKTFSFEFKNLPYAYGRKSSYLCFQVEREQHSSPVPSDWGVFKNQFCGTEPYHAELCFLNWFRAEKLSPYEHYDVTWFLSWSPCSTCAEEIAIFLSNHKNVRLNIFVSRIYYFWKPAFRQGLQELDHLGVQLDAMSFDEFKYCWENFVDNQGMPFRCWKKVHQNYKSVLRKLNEILRRR

SEQ ID NO: 101 - protein, 309 aa, synthetic construct
  REGION 1..309: note = Description of artificial sequence: pYY-BEM3.29; tr|G1Q1M4|G1Q1M4_MYOLU polypeptide sequence
YAELSFLDLFQSWNLDRGRQYRLTWYMSWSPYPDCAQKLVEFLGENSHVTLRIFAADIHSLCSGYEDGLRKLRDARAQLAIMTRDELQYCWVTFVDNQGQPFRPWPNLVEHIKTKKQELKDILGNPMRRMYPKTFNFNFQNLNSYGRKSTFLCFEVETWEDGSVLDYQNGVFQNQLDPGHAELCFIEWFHEKVLFPDEVRCPDAQYHVTWYISWSPCFECAEQVAGFLNEHENVDLSISAARLYLCEDEDEQGLQDLVAAGAKVAMMAPEDFEYCWDNFVYNRGWPFTYWKHVRRNYGRLQEKLDEILW

SEQ ID NO: 102 - protein, 216 aa, synthetic construct
  REGION 1..216: note = Description of artificial sequence: pYY-BEM3.30; tr|A0A1S3AN78|A0A1S3AN78_ERIEU polypeptide sequence
RRIEPWEFEDFFDPRQFRPETCLLYEVRWGSSRNAWRSTARNTTRHAEVNFLERFAAERHFDKPVSCSITWFLSWSPCWECSQAIGAFLSQHPQVTLAIHVTRLFHHEDEQNRQGLRDLLARGVTLQVMGDSEYAHCWRTFVNSPPGAEGHYPRYPSDFTRLYALELHCIILGLPPCLEILRRYQNQFTLFRLVPQNCHYQMIPHLNFFVVRHYFF

SEQ ID NO: 103 - protein, 201 aa, synthetic construct
  REGION 1..201: note = Description of artificial sequence: pYY-BEM3.32; tr|Q4VUI3|Q4VUI3_XENLA polypeptide sequence
MTMDSMLLKRNKFIYHYKNLRWARGRHETYLCYIVKRRYSSVSCALDFGYLRNRNGCHAEMLFLRYLSIWVGHDPHRNYRVTWFSSWSPCYDCAKRTLEFLKGHPNFSLRIFSARLYFCEERNAEPEGLRKLQKAGVRLSVMSYKDYFYCWNTFVETRESGFEAWDGLHENSVRLARKLRRILQPPYDMEDLREVFVLLGL

SEQ ID NO: 104 - protein, 191 aa, synthetic construct
  REGION 1..191: note = Description of artificial sequence: pYY-BEM3.33; tr|E2RL86|E2RL86_CANLF polypeptide sequence
MNPLQEETFYQQFSNQRVPKPTYQRRTYLCYQLKPHEGSVIAKVCLQNQEKRHAEICFIDDIKSRQLDPSQKFEITCYVTWSPCPTCAKKLIAFVNDHPHISLRLFASRLYFHWRQKYKRELRHLQKSGIPLAVMSYLEFKDCWEKFVDHKGRPFQPWNKLKQYSESIGRRLQRILQPLNNLENDFRNLRL

SEQ ID NO: 105 - protein, 226 aa, synthetic construct
  REGION 1..226: note = Description of artificial sequence: pYY-BEM3.34; tr|G1LWB0|G1LWB0_AILME polypeptide sequence
SSAAPASIHLLDEDTFTENFRNDDWPSRTYLCYKVEGPDQGSGVPLGQDKGILHNKPAQGPEPSRHAECYLLEQIQSWNLDPKLHYGVTCFLSWSPCAKCAQKMARFLQENSHVSLKLFASRLYTRERWDEDYKEGLRTLKRAGASIAIMTYREFEHCWKTFVLHDQEGSCFQPWPFLHKESQKFSEKLQAILQVGVLLLSLPPPLPSSPLSSPWPFPAPLRASTG

SEQ ID NO: 106 - protein, 238 aa, synthetic construct
  REGION 1..238: note = Description of artificial sequence: pYY-BEM3.35; tr|A0A1U7S7K7|A0A1U7S7K7_ALLSI polypeptide sequence
MGEHWQYAGSGEYIPQDQFEENFDPSVLLAETHLLSELTWGGRPYKHWYENTEHCHAEIHFLENFSSKNRSCTITWYLSWSPCAECSARIADFMQENTNVKLNIHVARLYLHDDEHTRQGLRYLMKMKRVTIQVMTIPDYTYCWNTFLEDDGEDESDDYGGYAGVHEDEDESDDDDYLPTHFAPWIMLYSLELSCILQGFAPCLKIIQGNHMSPTFQLHVQDQEQKRLLEPANPWGAD

SEQ ID NO: 107 - protein, 220 aa, synthetic construct
  REGION 1..220: note = Description of artificial sequence: pYY-BEM3.36; tr|A0A2R2X2J8|A0A2R2X2J8_PTEVA polypeptide sequence
MPRIGNMNLLSEKTFNYHFGNQLRVKKPQGRRRTYLCYKLKLPNETLVKGYFINKKKNHAEIRFINKIRSLNLDQTQSYKITCYITWSPCSYCAGKLVALVKSCPHLSLQIFTSRLYYHWLWKNQAGLRYLWKINISVLVMKEPEFADCWDNFVNHQSRRFKPWEKLTQYSNSTERRLLRILRINRTDLFLAQSSEQDPGLNDLVDAIKRLFLDAHRPRD

SEQ ID NO: 108 - protein, 198 aa, synthetic construct
  REGION 1..198: note = Description of artificial sequence: pYY-BEM3.37; tr|A0A151P6M4|A0A151P6M4_ALLMI polypeptide sequence
MAVEEEKGLLGTSQGWKIELKDFQENYMPSTWPKVTHLLYEIRWGKGSKVWRNWCSNTLTQHAEVNCLENAFGKLQFNPPVPCHITWFLSWSPCCQCCRRILQFLRAHSHITLVIKAAQLFKHMDERNRQGLRDLVQSGVHVQVMDLPDYRYCWRTFVSHPHEGEGDFWPWFFPLWITFYTLELQHILLQQHALSYNL

SEQ ID NO: 109 - protein, 158 aa, synthetic construct
  REGION 1..158: note = Description of artificial sequence: pYY-BEM3.38; tr|A0A2K6MNR2|A0A2K6MNR2_RHIBE polypeptide sequence
IWLCFTMEIIKQCSTVSWKRGVFRNQVDPETHCHAERCFLSWFWEDTLSPNTNYQVTWYTSWSPCLDCAGEVAEFLARHSNVKLAIFAARLYYFWDTDYQQGLRSLSEEGTSVEIMGYEDFKYCWENFVYNGDEPFKPWKGLKYNFLFLDSKLQEILE

SEQ ID NO: 110 - protein, 182 aa, synthetic construct
  REGION 1..182: note = Description of artificial sequence: pYY-BEM3.40; tr|F1CGT0|F1CGT0_ANOCA polypeptide sequence
KAAILLSNLFFRWQMEPEAFQRNFDPREFPECTLLLYEIHWDNNTSRNWCTNKPGLHAEENFLQIFNEKIDIKQDTPCSITWFLSWSPCYPCSQAIIKFLEAHPNVSLEIKAARLYMHQIDCNKEGLRNLGRNRVSIMNLPDYRHCWTTFVVPRGANEDYWPQDFLPAITNYSRELDSILQD

SEQ ID NO: 111 - protein, 230 aa, synthetic construct
  REGION 1..230: note = Description of artificial sequence: pYY-BEM3.41; tr|C7AGG3|C7AGG3_HORSE polypeptide sequence
MDPQAPTQRGGLGQAYQGGDYVQAPGNGNTQHLLSEDVFKKQFGNQRRVTKPYYRRKTYVCYQLKLLRGPTIAKGYFRNKKKRHAEIRFIDKINSLGLDQDQSYEITCYVTWSPCATCACKLIKFTRKFPNLSLRIFVSRLYYHWFRQNQQGLRQLWASSIPVVVMGYQEFADCWENFADNRGNPFQSWEKLTEYSKGIKRRLQKILEPLNLNGLEDAMGNLKLGSVDLG

SEQ ID NO: 112 - protein, 197 aa, synthetic construct
  REGION 1..197: note = Description of artificial sequence: pYY-BEM3.42; tr|A0A250YMK7|A0A250YMK7_CASCN polypeptide sequence
MSLLKEDIFLYQFNNQQQVQKPYFRRRTYLCYQLEQPNGSRPQWPAKGCLQNKKGHHAEIRFIKRIHSMGLEQDQDYQITCYITWSPCLACACALAELKNHFPRLTLRIFASRLYFHWIRKFQMGLQHLYKSGVLVAVMSLPEFTDCWEKFVNHRQVFFTPWDKLEEHSRSIQRRLRRILQSWDVDDLTDDFRNLRL

SEQ ID NO: 113 - protein, 189 aa, synthetic construct
  REGION 1..189: note = Description of artificial sequence: pYY-BEM3.43; tr|B7T160|B7T160_SHEEP polypeptide sequence
MPWISDHVARLDPETFYFQFHNLLYAYGRNCSYICYRVKTWKHRSPVSFDWGVFHNQVYAGTHCHSERRFLSWFCAKKLRPDECYHITWFMSWSPCMKCAELVAGFLGMYQNVTLSIFTARLYYFQKPQYRKGLLRLSDQGACVDIMSYQEFKYCWKKFVYSQRRPFRPWKKLKRNYQLLAAELEDILG

SEQ ID NO: 114 - protein, 541 aa, synthetic construct
  REGION 1..541: note = Description of artificial sequence: pYY-BEM4.1; tr|A0A182D0J1|A0A182D0J1_BLAVI polypeptide sequence
MTNPESPPQAPCDFNEDALLNREPLRGSPIKFVSPVDYPDLVFALAGPVGVDIDYIQQSISDCLKSFDYSTEFIRITEIMQDIKCSKTIDCTDMLKEYQSKIEYANELRRAYRAKDLLAALTISAISKLREQIKERDEATNKSNIQPSRRKLAWVVRQLKTPEEVRLLRAVYGKQFVLVSIYSSPQRREDFLISKIKIKSRGTIDNNTSSEGAQRLIERDSKEDNEYGQNLSGTFCLGDIFVDSNNKESAIVSIDRFLNAFFGSNEISPTRDEYGMYLAKTASLRSCDLSRQVGAAIFSKTGEIISLGSNEVPKAGGGTYWTGDNADSRDIRLGHDPNEINKVEIFAEIISRLLEDKLLSNDLLNKDAASIVTILLSKNEGKRYKDLRVMDIIEFGRIIHAEMSAICDAARNGRAIIGATLFCTTFPCHLCAKHIVASGIGRIVYLEPYPKSYAKKLHSDSIQVEDHSDSEKVSFEPFIGISPSRYRELFEGGRRKDPFGEALKWKNDPRKPVIDVVVPPHFEAEKLVIAQLGKLIVSGTG

SEQ ID NO: 115 - protein, 330 aa, synthetic construct
  REGION 1..330: note = Description of artificial sequence: pYY-BEM4.2; tr|A0A2D6EXD2|A0A2D6EXD2_9ARCH polypeptide sequence
MIIGLVGTIGAGKQTIIDYLQEKYGYNALSCSDVLREILKKQGKPVTRDNLREIGNKTREEGGNGAIAKILLEKLRNNWKANYIVDSLRHPDEVSVLRTSPLFHLVAVDADLRIRFERVKARKREEEPTTLPAFVERDQKEMFGTGNEQRIRETMELADELVLNNGTVEELKQRIDDLNLVSDERLRPSWDDYFMRLARLAAQRSNCMSRKVGAIITKDRRVIATGYNGTPRGVKNCNEGGCERCNSAVAKGTAISECLCLHGEENAIIEAGRVRSEGATIYTSFLPCLWCTKMIIQAGLKEVVFSEVYDLHEASIKLFETSGVLIRRLK

SEQ ID NO: 116 - protein, 367 aa, synthetic construct
  REGION 1..367: note = Description of artificial sequence: pYY-BEM4.3; tr|F7YVM7|F7YVM7_9THEM polypeptide sequence
MNEFKYMSLALKLAKKGKYTTSPNPMVGAVIVKDGKILATGYHKKAGQPHAEINALSKLNFQAQNCEMYVTLEPCSHYGRTPPCADAIIRSGIRKVVIATLDPNPLVNGKGVEKLKNAGIEVVCGVLEEKAKKLNEKFFKYITTKIPFVALKIAQTLDGKIALKNGESKWITSEKSREYVHKLRMEYDAVLTGIGTILKDDPQLNVRLKKVYKQPLRIILDSKLKIPLSAKVLEDPSKVIILTTALADKEKLEELRSKGVEVIITNEKNGIVDLESALKILGEKKITSVMVEAGPTLLTSFLKESLFDKIYLFIAPKIFGADSKSVFSELGLEDISKSQKFSLESVKKIGEDLLLELYPKQLKKLEE

SEQ ID NO: 117 - protein, 449 aa, synthetic construct
  REGION 1..449: note = Description of artificial sequence: pYY-BEM4.4; tr|A0A3M6UNF1|A0A3M6UNF1_9CNID polypeptide sequence
MEEKSELENELMRSTSPKPSVPNGSKGNECEQRETRITKENLYMVLALWMEEFPVVEQTSSAKRLNKVGVVFVLPTDRVLAADCSRDGVHGVARVMVNHCGKLEGCKVFVSRKPCSLCAKLLVQSKVSRVFYLPIEPESENKGEIARADNLFKNSSVGQSVFVPCVEQKVLDKLEDKLPKEIITPDDISECRDNLLKKCGWSAEWFARAQASLPWPCFEGKMKSQVDNDFKSLIKWIAVVKAPMDKGVAFPKVKLTSDSRVVPDCDADNFPDSKTAYHMMIFAKMLARQTDDPKTGVGAVIVRGKVPDIVSLGWNGFPSKALYGEFPRASDDDRALQKKFPYVIHAEQNALMVRNVKDLTDGILFVTKPPCDECAPMIKLSGVKTIVIGEKIEKSRGGELSYNLIKEYIKEGIMTCYQMEATKTKAKRLASDPETRKRLKSSCSNSNDV

SEQ ID NO: 118 - protein, 414 aa, synthetic construct
  REGION 1..414: note = Description of artificial sequence: pYY-BEM4.5; tr|A0A2G3K826|A0A2G3K826_9BURK polypeptide sequence
MTKIIDDVNTAAAAVLDQATAAANQTTFAVGGVMVNNQTGEVISAIHNNVIIPLSNNVSFTFDPTAHGERQLVYWYYANKEALKLPEPNQITVITSLDPCAMCTGALLTAGFNVGVVAIDTYAGINCAQNFQFATLPANLRTKAQKNFGYYASGAANFKPLTRSYVGGPSVAFKNGVVTPANLRDCGTVFTQSVDTVRNTSNSTGLAPSQMSNPAELPSNSAILQAYRAIYKKAFTIKIDNPRLPDAQILTELKAVLADAPNARNAVAFIDPFGNLVLCMADAFNTSPVHAAFMNVTQEYAKTRWDLMNKYAQASTTDNPALYLTHPKYGTFVYLYAPDPDDSITIMSLGAYGSTMEGPIPNMFPSNLQFYYPPRNGAQFSELVPVVNELPPFYTQNVNISLMQVPGVTQAPTK

SEQ ID NO: 119 - protein, 308 aa, synthetic construct
  REGION 1..308: note = Description of artificial sequence: pYY-BEM4.6; tr|K1ZCJ4|K1ZCJ4_9BACT polypeptide sequence
MSSRAKKNRSTNLKKSIGQKSIENKPTDQKKDQVLVAYVPVIHEGYRRFFRHFPAVKELWLISQELSHELRSLQKDIRALKASETKKLLQTWGQFQKIKLLTPSSLAILQKTTTQLVFPDEEISHHLVEKYFAQNRVLFASFFLRWDKKSSLKKHDLQEYSEISNKEFDQMMIAIAQQEADKSDDWWRQVGGLIFKDETILLLAHNQHTPTEAEAYFAGDPRADFHQGEYLKISTAIHAEAYLIAQAAKQGISLEGADLYVTTFPCPVCAKQVAYSGIKRVFFREGYSLLDGETILKANGVKLIRVTV

SEQ ID NO: 120 - protein, 615 aa, synthetic construct
  REGION 1..615: note = Description of artificial sequence: pYY-BEM4.7; tr|A0A1G3PNQ8|A0A1G3PNQ8_9SPIR polypeptide sequence
MRDLPLLVLGLTGPMGAGCTRFARDISKMEPGKVIKKQGLLDQVAHEISELSKKASEIRLQCISNGKNSELAELKRLNRRLNAKLAERACLHVIAKSSLPEPLFISLNTIVIKIAVDSITAPEFAEWAKNHAKVADLLKWLRTQWESELTLYETWGQDAGRFSQDELEKMDAMFAEFERIGDEILKEDFETYFGKRNNDFSIRMFSENIRLSGNPFRPAENGGGGGKYDEPSMVMIARETDRYIRFYRTRSDQKRSHFFIIDEIKNPREAEYFRARHQNFFLVSIFSSSEIRASRMRRGLGHDAGVSDADFQHLFRELDSRDWGADDFDAHGLHRQNIYRCFNLADIAINNDVEDERFSEVLFNKFIRYYALMLSPGCVQPTPQETYMHLAYSLSLRSTCISRQVGAVITDLEDRILSLGWNEVPEGQIGCGLKVKKDYTDKENPLFEMEIWDNVITAEDLAVWDDEDSICVKDILSRIEIKTKLKSVSLTPEERADVLKALRIKRLEYSRSLHAEENAILQVASRGGVGLKDGTIYVTTFPCELCSKKIYQVGISKIYYTEPYPNSISEKVILKDGIRNIKILQFEGVKSYSYFKLFKPGFDKKDAQMLEGRGI

SEQ ID NO: 121 - protein, 291 aa, synthetic construct
  REGION 1..291: note = Description of artificial sequence: pYY-BEM4.8; tr|A0A1G0PGF4|A0A1G0PGF4_9BACT polypeptide sequence
MKHNNQLRKEIEKLLGQNSIIKNDELKKLQKEYKIETDELLISFLPYAAEFAKVPISKYKVGAVVLGKSGNIYFGSNMEFEAGALSATVHAEQSAVNNAWLNGETGINKIAVTAAPCGYCRQFLNELTTAKQLHVLLKDKNLEAAKVFKLTELLPEAFGPRDLEIEGGLMKVENHKLKIENINDELINAALEAANKSYAPYSKNYSGVSIQLSDGTIFSGRYSENAAYNPSLLPFQSALAFMNMNTKKGSNNKIVDAVLVEAVSNISQKDAAGTLLNSISKTKLRYYKIKN

SEQ ID NO: 122 - protein, 398 aa, synthetic construct
  REGION 1..398: note = Description of artificial sequence: pYY-BEM4.9; tr|A0A0P4WGY5|A0A0P4WGY5_9EUCA polypeptide sequence
MEENSSATSQPKCASRTKQGGNDLSTDMSNLSVGETKRTDFLPWDDYFMAVAFLSAMRSKDPSSQVGACIVNADKKIVGIGYNGMPIGCSDDELPWNKESLDPLQTKYMYVCHAEMNAIMNKNSSDLAGCCVYVALFPCNECAKLVIQAGIREVVFFSDKHQQKPETVASKKMLNMAGVAYRQYTPSQSKIELNLSLKEQEKSEPTADITQSSERDQNSKRKDYLSWEEYFMAMAHLSALRSKDPITQVGACIVNSKKKIVGIGYNGMPLGCNDDLMPWGNSSSNKLETKYMYVCHAGVNAIMNKNSCDVSGCTLYVALFPCNECAKVIIQAGIKTIIYASDTNKDQASILASKKMLDMAGIKYRADNLSQRKIVIDFKTIDWNSRFMNDHQNDPTCL

SEQ ID NO: 123 - protein, 259 aa, synthetic construct
  REGION 1..259: note = Description of artificial sequence: pYY-BEM4.10; tr|A0A3D8IG27|A0A3D8IG27_9HELI polypeptide sequence
MRKNILYFILTLFFLSGLYATSLPEDNVVSGVIYEKIDTVSAEVDHIYPMLALAIVYKDWQEKNMLNKQGHNIGLVIVDENNMPVFWVRNSVHATHNGTQHGEVRLVSNLLNCEGFNKYLDKYTLYTTLEPCIMCAGMLSMVQIPKVVYAQKDLSCGNTQEIISTAKYPRYYKAFTVENGYKKDLEECFEQYKICKNDSITDFLVNDSAKEIFRKASNDLQDYKVKFKENRRVIKVAQEFLQNIQTKDNLDVLQCPKNM

SEQ ID NO: 124 - protein, 256 aa, synthetic construct
  REGION 1..256: note = Description of artificial sequence: pYY-BEM4.11; tr|A0A351C8C4|A0A351C8C4_9BACT polypeptide sequence
MNELTKQSEHLRNEALRIATRSYVPYTGQQEGVIILLENGDLIPGVRVENASFQLTIPALQNALSTMYALQRTDISMIVSSIPFTDSDLAYTGGMAEIAWEMVGASLLLVAGAHIPEAGTFIDPARGENLLDVSREAALNAFIPESDFPVGSAIQTSDDVVIDGCNVEHSDWSKIICAERNVLSTARSYGLGQITTIYVSCPKEPGGTPCGACRQVIVELAPDATVWMDRGNQEPIAMKATKLLPGHFTGNVLKKQ

SEQ ID NO: 125 - protein, 301 aa, synthetic construct
  REGION 1..301: note = Description of artificial sequence: pYY-BEM4.12; tr|A0A1G6V2K7|A0A1G6V2K7_PEPNI polypeptide sequence
MPIVRVNEIGARLPEDWEALETAIWQAYVSREDLPDAGELDLTLVDDATIQELNKTHRQLDKSTDVLSFPMYDDRDDLAADVQAGLPVILGDIMISVPTAERQAQAYGHSFKREMAYLLVHGLLHIAGYDHMSAEEKSAMRRAEEAILADVDVPRDTAPSKTAAVLDEADVQALIDAARAARLQAYAPYSGYAVGAALLAADGRRFCGVNVENASYGATCCAERTALFAAVTAGARDFIALALVTEGDEPAPPCGLCRQALAEFSPDLAIYLAGPTGETYRRTSLAALFPEAFSLSTKESV

SEQ ID NO: 126 - protein, 528 aa, synthetic construct
  REGION 1..528: note = Description of artificial sequence: pYY-BEM4.13; tr|F2NP91|F2NP91_MARHT polypeptide sequence
MPVMETHALEARFKEALARLCPEGRLLAAVSGGGDSVALLYLLKAAGRDTIVAHLDHALRPDSAADAAFVEKLAQRLGFPLETEHVDVRALAHRKRINLEAAAREVRYAFLARVARRWKARCILTAHTLDDNAETVLLQILRGAGRGLGIRPLQRRVARPLLEFSRAELRAYLEARGARWLEDPTNRSLELDRNYLRHAVLPRITARFPHALEALARFSQAQQADDWALEALSARHLIPDRRWPVPAYRALPLERAPEALRRRAIRGVLEALGVRPEARLVADVEAALGGRAQTLPGGVVVRRQRGTLFFIPPTVRFPKVQPPAGLEARPPRPGDYLVFPYGRKRLVDFLNERGVPRELKRRWPVGAVGAEVRWVYGLWPEPDEDRYMRRALVLARAAARQGEVPIGAVLVRDGAVLAEAANAVEASRDATAHAELLALRTALRRVGEKVLPGATLYVTLEPCPMCYGAILEARVARVVYGVENLKAGAFTVHGLEPRVALEAGRVEGECAKVLKDFFARLRPGRDGA

SEQ ID NO: 127 - protein, 226 aa, synthetic construct
  REGION 1..226: note = Description of artificial sequence: pYY-BEM4.14; tr|A0A316TX77|A0A316TX77_9BACT polypeptide sequence
MINGYTPYSGNQNTCYVKGESGTFYPGVRIENVSYPLTISSVQAAVCSCLANSDNPVEYYTGDHQPELLQVWADEYDMKPGGKLPDSPLKLFDPLVPSIPDIKKELDVLTEKSVTPNSGFPVSALLQTEKGYIRGVNIELSSWALGLCAERVAISRALTAGYTQFKSIHIYAPEADFVSPCGACRQVLLEVMPDADTELYHGDGTLSKHIVSDLLPFGFTSHKLKK

SEQ ID NO: 128 - protein, 321 aa, synthetic construct
  REGION 1..321: note = Description of artificial sequence: pYY-BEM4.15; tr|R6VYG3|R6VYG3_9FIRM polypeptide sequence
MIHKGTQTIETKRLILRAFTPDDAEAAFENWMSDPKVTEFLRWKTHADISDSRKIVNEWANGSADPEFYQWAIVPKDVNEPIGTISVVDRNDALGIFHIGYCIGSKWWHKGITSEAFSAVIHFLFEEVGANRIESQHDPENIHSGDVMKKCGLTFEGTLRQADFNNRGIVDACVYSILQSEWQNNTSVWQRLYNAALTVQNDRVVSPFIDAGGVAAALMTKKGNIYTGICIDTASTLGMCAERNAVANMLTNGESRIDKIVAVMPDGKVGAPCGACREYMMQLDRDSGDIEILLDLETEKTVRLKDLIPDWWGAERFGDTE

SEQ ID NO: 129 - protein, 229 aa, synthetic construct
  REGION 1..229: note = Description of artificial sequence: pYY-BEM4.16; tr|A0A3C1HZ18|A0A3C1HZ18_9BACI polypeptide sequence
MGDIMENWNELSEPWKRCFLQAWKAYCHGSIPIGAVLVDSEGEIFLEGRNRVHELTAPEGQLCDCRIAHAEMNVLVQVKTSDYEKLSGATIYSTMEPCIQCFGAIILSRIKNISFAAIDDKLAGATTLEDRHGFIKSRNLNIAGPFSHLGEIQIILRTDFLLRIFDSEYADPLIAAHEKDYPIGVALGRHYHRNNRLQVAKKETIPFGELFNEFSFDIKRAREGYTLGK

SEQ ID NO: 130 - protein, 205 aa, synthetic construct
  REGION 1..205: note = Description of artificial sequence: pYY-BEM4.17; tr|A0A1M6KV24|A0A1M6KV24_9BACT polypeptide sequence
MEASQQNILLKIEGKGPVAEINFTVTLPEWLVEQVQSGSTVFLTQKEKMRFVLELARKNVAQETGGPFAAAVFSLESGELVSAGVNVVVESRCSSAHAEVVALSLAQKAVDSHDLGAAGLPRMVLVSSAEPCAMCMGAIPWSGVKQVICGARDEDVRSVGFDEGAKPLEWVEDFAERGIEVIRDVLREEATEVLWDYRERGGEIY

SEQ ID NO: 131 - protein, 207 aa, synthetic construct
  REGION 1..207: note = Description of artificial sequence: pYY-BEM4.18; tr|A0A2U0T9B4|A0A2U0T9B4_9RHIZ polypeptide sequence
METAELISRLLDVIEKDIAPVTAKGVARGNKLFGAAILKKSDLAVIVAETNNEIENPLWHGEMQAIKRFFELPADQRPATRDCLFLATHEPCSLCLSGITWSGFDNFYYLFSHQDSRDGFAIPYDIQILKSVYAVPEPETGTVSPARDLYNRSNDFWTSHGLQDMIAGLARSNREALLARIDDLNALYAELSERYQRDKGGKGIPLP

SEQ ID NO: 132 - protein, 231 aa, synthetic construct
  REGION 1..231: note = Description of artificial sequence: pYY-BEM4.19; tr|A0A2K9PN08|A0A2K9PN08_9FLAO polypeptide sequence
MSDKKESKIKISKTSESIELDEIHSLLSYSIVQKFWENDDRNGRGYNVGVILVDENKNIVDWDINSVNKTENSTQHGEMRLISRYLDKDELYSLKGYTMYPTLEPCAMCAGMMTMTNVYRTVNGQMDYFYSKALERLSIDTRECGGYPPYPRTVISEISPSSISTRLDAEYKQYTNAGNKPIITKFLSTYKAKTIYDDAFNQFINFKCKFPENKTKYENAIKFYNSLPESI

SEQ ID NO: 133 - protein, 330 aa, synthetic construct
  REGION 1..330: note = Description of artificial sequence: pYY-BEM4.20; tr|F4PWM7|F4PWM7_CAVFA polypeptide sequence
MRFSLSLLFVILSVLLAGVLACKDPYNPETVDYGQCASATKANYEVRSDSKVLTPADLPADELAVHESRMRHIIDIARVNNKKFVSSIYFPNGTLACIGINTGKPNMIAHGEIVAIQNCTEIHGISMYTNYSIYTTGEPCSMCASAILWSRFKTVVWSTYNSDLYCKICMSNIPIDSSYIFSRAYGLGIEAPVAIGGVVKAEGDAWFGTYCNRPTSIYYIAPKCACQDPAKVSPLKFTQTRTTVWVEGGDKVVTQWNAIISNPSNSTIVDPPIVISPSVVFKGAPWGISAASEPNTYKLSYNKVLFPGQTFSFGYSVYGLEEVAFTALEA

SEQ ID NO: 134 - protein, 193 aa, synthetic construct
  REGION 1..193: note = Description of artificial sequence: pYY-BEM4.21; tr|U7QZM1|U7QZM1_PHOTE polypeptide sequence
MNKTRRKLLATLGIMSISMSFIAQAGEKKTQVINNILSKQEITEHEKYMREAIKEAIKNPKHPFGAVIVNRNNGEILSRGVNTGRNNPILHGEIQAINHYITQYGNQGWENVALYTTGEPCSMCMSALVWIGIREVIWATSISVIRNSGIRQIDISAHEIAERASSFYNPITLVGGILANETDKLFLERKRGN

SEQ ID NO: 135 - protein, 319 aa, synthetic construct
  REGION 1..319: note = Description of artificial sequence: pYY-BEM4.22; tr|A0A081CH48|A0A081CH48_PSEA2 polypeptide sequence
MASRRHLLATQVTGNHRKLSLWHLRGWLSPYTKLVDAVYFLTTNSFYHSLQTPPVQSITMLLSSIITSLALAAQASAYREGLHPEFQSGLSINSVPATDRDHWMRLANSAIYYPPVSHPCPQAPFGTAIVNTTSNELICAIANRVGSTGDPTQHGEITAIQHCTNVMRKKGLSPQEIIAAWKQLSLYTNAEPCTMCLSAIRWAGFKEVIYGTSVGTISENGRNQIYIPSNLVLEKSYSFGHATLMLGNILTHETDPFFQHQFNESAPCPVGCERTQVGEARVKTCEPVPNWQKLVRLEYSEDSRVGSEPVAHTPLHLEL

SEQ ID NO: 136 - protein, 203 aa, synthetic construct
  REGION 1..203: note = Description of artificial sequence: pYY-BEM4.23; tr|A0A3D3HMU1|A0A3D3HMU1_9GAMM polypeptide sequence
MDYSDAILGAITSIRRNSKQPGVNVTDNVTDSSTQYNNDEYWMRRALALAREAGEAGEIPVGAVLVKDNQQVAGGFNQPIRSHDPAAHAEILTLREAGAVLGNYRLIDTTLYVTLEPCMMCAGALVHSRIKRLVFGAAEPKTGAAGSFIDLLTLPRLNHYMEVTGGVLGEECSVLLSDFFRRRRAEKKALKRQNSESGSDSAS

SEQ ID NO: 137 - protein, 270 aa, synthetic construct
  REGION 1..270: note = Description of artificial sequence: pYY-BEM4.24; tr|A0A1N5WT13|A0A1N5WT13_9ACTN polypeptide sequence
MLEKIERRLVAAAEAVVRSPSTGDAHTVAAAAMDANGDIYSGVNVFHFTGGPCAELVVIGSAAAANAPPLITIVAVGDGDRGVIAPCGRCRQVMLDLHPDVFVIVPTGDGQLAAKPVRELLPFGYVARTGSTAPRVVYFHPRHYDTISSGLKTATVRFQDSVQTGPAVFVFDDGESIRRLDAVVEKVESRRLDHLTEEDAHHEALPDSDALRDAIKTQYPMLGDGDVVDVATFRLTAISAPDPDPRSSYPPAVSRCNPAGPRADLLVGQS

SEQ ID NO: 138 - protein, 257 aa, synthetic construct
  REGION 1..257: note = Description of artificial sequence: pYY-BEM4.25; tr|X0SAC5|X0SAC5_9ZZZZ polypeptide sequence
MTKDGRVIASAHDTEVTDQDSTAHAEINAIRKASKIYRKDLTGCLIISTHEPCPMCTGSIIWSNISKVVYGVSIRDSIKAGRDMINLSCKEIIKKPNAEINIYDGILKKECLKLYNNDTRKLVKKFRKYEWINIEENLLNKRMQWFENNKTMIRKLKGNDLEKAYHLILMKIGIKRSEAPIVKKSESKIIFHSKNYCPSLEACIILDLDTREVCKEIYERPTEELIRRLNSKLRFTRNYDCIRPYSDYCEEIIILEK

SEQ ID NO: 139 - protein, 154 aa, synthetic construct
  REGION 1..154: note = Description of artificial sequence: pYY-BEM4.26; tr|A0A3B8IC10|A0A3B8IC10_9BACT polypeptide sequence
MPSHEDFIHQCLELGKEALLQGNPPVGSVIVWQDQVIGRGIENGRSSGDITQHAELLALQEAVATGQRDKLKEAIIYSTHEPCVMCAYPIRQYKIPTVVYSVAVPELGGHTSSWHLLTTEDVPKWGKAPKIITGISAEEVEALNAAFQDSLKKG

SEQ ID NO: 140 - protein, 180 aa, synthetic construct
  REGION 1..180: note = Description of artificial sequence: pYY-BEM4.27; tr|A0A2N9P8B9|A0A2N9P8B9_9FLAO polypeptide sequence
MFIFKLISPPVSIEVYQDKIIQKLYICFMENIFTDEYFMKKALQEAETAFQQGEIPVGAVIVIDNRIIARSHNLTEMLNDVTAHAEMQAITASANFLGGKYLKDCTLYVTLEPCQMCAGALYWSQISKIVYGATDEQRGYRAMGAQLHPKTKVISGIMQNECTHLMKDFFKQRRSKSTKD

SEQ ID NO: 141 - protein, 178 aa, synthetic construct
  REGION 1..178: note = Description of artificial sequence: pYY-BEM4.28; tr|K1KX30|K1KX30_9BACT polypeptide sequence
MVKNPVNNNELYFGKHSEIPMNEEQKAYMKMAVDLSRSGMESGKGGPFGCVIVKDGKVIGIGSNSVLETNDPTAHAEIVAIRDACRNLGHFQLDGCEVYTSCEPCPMCLGAIYWARPSKVFFANDKRDAAEAGFDDDFIYQELELPYEKRKIPFEQGMQDTAKEVFQEWILKEDKTLY

SEQ ID NO: 142 - protein, 196 aa, synthetic construct
  REGION 1..196: note = Description of artificial sequence: pYY-BEM4.29; tr|R4XI84|R4XI84_TAPDE polypeptide sequence
MSSEIEPPSTDVHKHAVAEAADESGAADAFMQIALQQAETALLNKEVPVGCVFVHQPTGTVLATGANQTNASLNGTLHAEFVAIESILRDHPPSIFRESDLYVTVEPCVMCASALRQLQVRKVYFGCGNDRFGGCGSVFSIHSDASKTGDAAYMVESGIFRKEAIMLLRRFYLLQNESAPKPALKSTRVLKEHFDE

SEQ ID NO: 143 - protein, 212 aa, synthetic construct
  REGION 1..212: note = Description of artificial sequence: pYY-BEM4.30; tr|A0A239CVF7|A0A239CVF7_9DELT polypeptide sequence
MSPASKKHFPSLFSFLLLTIGLICGTAHAQPQGHTADDTAATLANASLKEHEPFIRRCYQLAIDAGKKGNHPFGALLVHKGKIVLEAENTVLTDNDFTNHAEMNLIAEAARTLSRQIIPEATVYTSCAPCAMCTATLAMAGFTRIVYGVSHDALNKRFGLKGKSVSCPALFKTMGMELEFVGPVLEKEGLRVFDFWPEKDPHAQMLKKQARK

SEQ ID NO: 144 - protein, 320 aa, synthetic construct
  REGION 1..320: note = Description of artificial sequence: pYY-BEM4.31; tr|A0A1Q3NME1|A0A1Q3NME1_9BACT polypeptide sequence
MTEFNYDWAKLAFSSKRPLTNLKATFIIAPREISEKRFTQLLKEYLPKGDILLGISKEDYVEGLEGQPQFAMLQQKTLQKLIDKVNDASAHKVYTLRYFQRELPAIIEKLTPPRVVGIHGSWHHSFHTLPIYYLLSEKRIPYQLVAAFSDEDEARAYEVATDKKIVRPTLEGSFDDTTVLQLTDEVAKSSYDYGFQTGAILAEKVNGVYQPVAAGFNKVVPYQTYALLNGASRETNFSPANDMNHYDTIHAEMQILVEAAKQGISLKDKTLFVNLMPCPSCARTLSQTELSEIVYRIDHSGGYAVDLLTKVGKDIRRIVY

SEQ ID NO: 145 - protein, 180 aa, synthetic construct
  REGION 1..180: note = Description of artificial sequence: pYY-BEM4.32; tr|A0A2G6N4N7|A0A2G6N4N7_9DELT polypeptide sequence
MKERTVSYSDRHFMAEALEMAESALTQGEFPVGCVIADGTAVVARGHRTGTTAGAVNEIDHAEINALRHLGLAGEHLDRTDLTIYSTMEPCLMCFAAIVLSGINRIVYAYEDVMGGGTGCDLTGLPPLYRDAPLTLVAGVRRRASLNLFRRFFTDPENGYWAGSLLSRYTLNQTKDSHRL

SEQ ID NO: 146 - protein, 156 aa, synthetic construct
  REGION 1..156: note = Description of artificial sequence: pYY-BEM4.33; tr|A0A0G0RBB8|A0A0G0RBB8_9BACT polypeptide sequence
MQSVQYNKLTHLQRRALDEAEQVLENSYNPYSHFYVGACLISEDEQLIAGTNFENAAYGSAICAERAAVLRANAMSIRRFRGIAIIARGEDFNTTEVTGPCGSCRQVLYEISQVSGCDLQVILATSKKDKIVITTIRELLPLAFGPLDLGVDIGKY

SEQ ID NO: 147 - protein, 217 aa, synthetic construct
  REGION 1..217: note = Description of artificial sequence: pYY-BEM4.34; tr|A0A327L2Q5|A0A327L2Q5_9RHIZ polypeptide sequence
MVTSRDGEDEAMMARCVALSRIAVGKGEYPFGAVVAREGRIVAEAINRTIRDGDVSRHAEVIALARAQKAIGRRELRECSLYSNVEPCAMCSYCIREAWVGRVVYALGSPVMGGVSKWNILRDDGLSGRMPQVFDAAPEVVSGVLVEQAQAAWRDWSPLAWEMITLRGLMTDPSARPECRTRAARPRSLWHHLVALIERPPRPYVDPTSAAEGHADL

SEQ ID NO: 148 - protein, 162 aa, synthetic construct
  REGION 1..162: note = Description of artificial sequence: pYY-BEM4.35; tr|S2DR30|S2DR30_9BACT polypeptide sequence
MKMKKKIEITVSLEVIQKSEWSKEDRSLIERAIHAVEHAHAPYSNFMVGTALLLDNGQIFSANNQENVSFPVGICAERAVLSYAMGNFPNNRPVKLAVVAKRRSDSTWATVTPCGLCRQTINEYEVKFGHPIEILMLNPGEEILKASGIDQLLPFRFNDLNS

SEQ ID NO: 149 - protein, 153 aa, synthetic construct
  REGION 1..153: note = Description of artificial sequence: pYY-BEM4.36; tr|A0A369QGF1|A0A369QGF1_9BACT polypeptide sequence
MEEHEKWMHWCLNLAQQALQQGDFPVGAVVVQKGKLIGQGVEAGQLKKDITCHAEMEAIRDARQTINTADLQNCILYSTHEPCIMCSYVIRHHKISRVVVGTTVPEVGGSSSAYPLLSAPDISIWVAPPHLVTGVLAEACQALSQAYKQKFKK

SEQ ID NO: 150 - protein, 159 aa, synthetic construct
  REGION 1..159: note = Description of artificial sequence: pYY-BEM4.37; tr|A0A1W6X4U4|A0A1W6X4U4_9RHIZ polypeptide sequence
MTNPSRQERWDRRFLELAKVFGTWSKDRSAGTGCVIVGPDRLLRASGYNGFARGIDDEVPERHERPAKYSWTEHAERNAIYNAAKLGISLDGCTAYVNWFPCIDCARAIVQAGIVRLVGLHPDHADQRWGSEFKFATEMLRESGIEIILYDIPELAARK

SEQ ID NO: 151 - protein, 490 aa, synthetic construct
  REGION 1..490: note = Description of artificial sequence: pYY-BEM4.38; tr|A0A238BW09|A0A238BW09_9BILA polypeptide sequence
MEEMARKIRTKAKKANSYCNTMTFLISKASIVLLKAECKRIELTVVIFRFLIKMNASEPNNELCDMTVIKSMLKITHVIFDLDGLLIDTEVVFSKVNQCLLSKYNKKFTPHLRGLVTGMPKKAAVTYILEHEKLSAKVDVDEYCKKYDEMAEEMLPKCSLMPGVMKLVRHLKTHSIPMAICTGATKKEFEIKTRYHKELLDLISLRVLSGDDPAVKRGKPAPDPFLVTMDRFKQKPEKAENVLVFEDAANGVCAAIAAGMNVIMVPDLTYMKIPEGLQNKINSFSDNLIISNDLNVALMSLKKELSEEEVHFLNRAFEIAVDAVLNNEVPVGCVFVFEGQEVAFGRNDVNRTKNPTYHAEMVALKMMKQWCMDNGRDLEEIMRRTTLYVTLEPCIMCASALYHLRLKKILYGAANERFGGLVSVGTREKYGAKHFIEIMPNLSVDRAVKLLKEFYEKQNPFCPEEKRKVKKPKKSGNNNDNSDDAVALNV

SEQ ID NO: 152 - protein, 159 aa, synthetic construct
  REGION 1..159: note = Description of artificial sequence: pYY-BEM4.39; tr|A0A1J5H6Z0|A0A1J5H6Z0_9BACT polypeptide sequence
MAYQPSEKFMQMAIDKTREGVLSGQTPFGACIVKDGKVVACEHNTVWQDTDITSHGEVHTIRAACKAIGSIDLSGCILYSTCEPCPMCFSAIHWARIDTVVYGAFIADAQDAGFNELTISNEKMKEFGGSPVNFISGFMRDENVALFKLWKEQGANNVY

SEQ ID NO: 153 - protein, 168 aa, synthetic construct
  REGION 1..168: note = Description of artificial sequence: pYY-BEM4.40; tr|A0A3C2D945|A0A3C2D945_9BACT polypeptide sequence
MKTTEIRIIVHEYQNIDELTENDQYLLHEARRITEFAYAPYSGFHVGAAILLGNGMIVKGNNQENSAYPSGLCAERVALFYANANYPDSEVKTIAISAAKNGILVNDPIKPCGGCRQTLSEAEVRFGSPIRIILDGQDSILVLHGVESLLPLSFSKKDLASPLAATGR

SEQ ID NO: 154 - protein, 214 aa, synthetic construct
  REGION 1..214: note = Description of artificial sequence: pYY-BEM4.41; tr|A0A1I7EYS3|A0A1I7EYS3_9BURK polypeptide sequence
MKFKLDPSRPPDEDDYYLGVALAVRRKANCTGNRVAAVIVKNKRVIATGYNGVPEDMPNCLDGGCLRCSNPGGQFKSGTRYDLCICVHAEQNALLTAARFGISVEGAHLYTTMQPCFGCAKEILQAKIEKVFYLHPWVPTDVDPVMDAAMKAEYAKIIGKLKVKKLDFDDPVATWAVTTMRQAALASDKNPDKKTPPKTAKKKVAKKKSRTSPR

SEQ ID NO: 155 - protein, 155 aa, synthetic construct
  REGION 1..155: note = Description of artificial sequence: pYY-BEM4.42; tr|H8GQX8|H8GQX8_METAL polypeptide sequence
MNHEHFMRRAIELARQAPQYPFGAVIVRRDDGQCVGQGFNRSDLNPTYHGEMVAINDCAVRHCAEDWRGFDLYTTAEPCAMCQGAIEWAGIGRVFYGTSIPYLQKLGWWQIDLRAAEVSARAVFRDTLIVGGILETECNALFAAARRGCFGTGSE

SEQ ID NO: 156 - protein, 156 aa, synthetic construct
  REGION 1..156: note = Description of artificial sequence: pYY-BEM4.43; tr|A0A0S8HZN3|A0A0S8HZN3_9CHLR polypeptide sequence
MDEHDIRFLRASFDVARNARKNGNHPFGALLVDEHGRIVMEAENTVITAKDCTGHAETNLMREASSKYDSDFLANCTIYTSTEPCPMCAGAIFWSNVRRVVYGLSEESLYEIAGRGSEEVLFLSCREIFERGKKLIEVIGPLLEDEAREVHMGFWR

SEQ ID NO: 157 - protein, 193 aa, synthetic construct
  REGION 1..193: note = Description of artificial sequence: pYY-BEM4.44; tr|E3SF31|E3SF31_9CAUD polypeptide sequence
MKPTTVLQIAYLVSQESKCCSWKVGAVIEKNGRIISTGYNGSPAGGVNCCEHAEEQGWLLNKPKPVLIPGHKSECVRFSQVDRFVLAKAHREAHSAWSKNNEIHAELNAILFAARMGSSIEGATMYVTLSPCPDCAKAISQSGIKKLVYCETYDKNIPGWDDILKNAGIEVFNVPKRSLDKLNWENINEFCGE

SEQ ID NO: 158 - protein, 330 aa, synthetic construct
  REGION 1..330: note = Description of artificial sequence: pYY-BEM4.45; tr|F8AAC6|F8AAC6_THEID polypeptide sequence
MIRAPWHEYFMLLAKIVALRSGCNSRPSGAVIVKNKRILATGYNGPMPGAWHCTDRGPGYCFRREKGIPDIDKYNFCRATHAEANAIAQAARFGISVEGASLYCTLAPCYVCLKLIASAGIKKVYYEHDYGSRDFERDQFWKEAIKEAGLEKFEQITVSQEVMEQLQEILPYPTSKRRLAPTEFLDEFEDGKKYGVPSIEVLFNKLNYLTRQALKDITFVIEKTTVTEEPEGISFYLSGKMVELSELINTVKKQINADQNFYFLAKHNAIEAKIEILREAENIRLKAFLNECPLESFKRIAESLDYILYQVSNSLSLPTRLELSVNLLRI

SEQ ID NO: 159 - protein, 158 aa, synthetic construct
  REGION 1..158: note = Description of artificial sequence: pYY-BEM4.46; tr|A0A2H4ZNK4|A0A2H4ZNK4_9EUKA polypeptide sequence
MKKQLSRKIQEEWMSRLLRNAYDAGTYGEVPIAAVILNESGQCIGWGRNCREKDQNPLGHAEIIALRQASYLKKSWRFNECTMLVTLEPCPMCAGALLQARINHIIYGASDYKRGGFGGVLDLSKNSSAHHKIEITRGVKSIQSCQLLETWFRRRRRV

SEQ ID NO: 160 - protein, 176 aa, synthetic construct
  REGION 1..176: note = Description of artificial sequence: pYY-BEM4.47; tr|A0A239N5N1|A0A239N5N1_9PSED polypeptide sequence
MEGRAGIIPFDEGGAAMGPAEEDSPMQHLAYMREALALARANVEAGGRPFGAVLVRDGEVIARAANGTHLDHDPTAHAELLALRAAGRALGSPRLDGCVVYASGHPCPMCLAAMHLSGVSAAYYAYSNADGEPYGLSTAAVYAQMAQPVEWQSLPLQALRPEDEEGLYGFWRERRP

SEQ ID NO: 161 - protein, 199 aa, synthetic construct
  REGION 1..199: note = Description of artificial sequence: pYY-BEM4.48; tr|A0A328VTR2|A0A328VTR2_9PSED polypeptide sequence
MHPEHLALLQQAPASTHADDTWARLCCEQALLAVEEGCYAVGALLVDGAGELLCSGRNQVFAPAYASAAHAEMRVLDQLEAEHAQVDRRSLTLYVSLEPCLMCYGRILLAGITRVRYLARDRDGGFALRHGRLPPAWANLASGLSVVQAKADPYWLDLAEHAIGRLQDRQTLRQRVIRAWRGQRTLTDEFSSTKRTHSG

SEQ ID NO: 162 - protein, 402 aa, synthetic construct
  REGION 1..402: note = Description of artificial sequence: pYY-BEM4.49; tr|A0A103YG48|A0A103YG48_CYNCS polypeptide sequence
YIRELHASSLRRDEHEIQNPKILVIVDRLSSPSLHVSLSLSLSLVIFPPFIPLNQTPTHMENAKVVEAKDGTIAVASAFSGHQEVVQDRDHKFLTRAVEEAYKGVECGDGGPFGAVVVHKDEVVASCHNMVLKHTDPTAHAEVTAIREACKKLNKIELSDCEIYASCEPCPMCFGAIHLSRIKRLIYGAKAEAAIAIGFDDFIADALRGTGFYQKAHLEIKQADGNGAMIAEQVFEKTKAKFAIDHKFLTRAVEEAYKGVECGDGRPFGALVVHKDEVVVSCHNMVLNYTDPTAHAEITAIREACKKLNRIELSDCEMYSSCEPCPMCFGAIQISRIKRLVYGAKAEASIASGIPIGDFISDALKGTGFHEKANFEIKQADGNGAMIAEQVFERTKAMFPKR

SEQ ID NO: 163 - protein, 195 aa, synthetic construct
  REGION 1..195: note = Description of artificial sequence: pYY-BEM4.50; tr|W5M1M8|W5M1M8_LEPOC polypeptide sequence
NSSTRESRVMAQMEINGGASPPKKPGKGQSAADQDMITGLINKALQAKEFAYCPYSNFRVGAALMTNDGRVFTGCNVENACYNLGVCAERTAILKAVSEGYESFRAIAVSSDLQDQFISPCGACRQVMREFGTGWDVFLTKVDGSYVRMTVDELLPMSFGPDDLKKKKVFSLQNGHEVSTQFYTHSPCEAGENNN

SEQ ID NO: 164 - protein, 134 aa, synthetic construct
  REGION 1..134: note = Description of artificial sequence: pYY-BEM4.51; tr|A0A3N5YPZ2|A0A3N5YPZ2_9ALTE polypeptide sequence
MSNSETEHIQALVDAAQAAQKQSYSPYSSFQVGAAIFADDGNTYSGCNIENVAYPLGQCAEATAIGMMIMQGAKRIEDIMIASPNDQVCPPCGGCRQKISEFGTAETKIHMVTRSGEVSTVTLGELLPLAFDSL

SEQ ID NO: 165 - protein, 162 aa, synthetic construct
  REGION 1..162: note = Description of artificial sequence: pYY-BEM4.52; tr|A0A2A9NC86|A0A2A9NC86_9AGAR polypeptide sequence
MTNSTLSNEDRTRLIQGAFQARKKTYSPYSNFPVGAALLTTDGRIIEGANIENASYGGTICAERTAIVKAVSDGYRHFAGIAVTTKMPTRVSPCGICRQVLREFCSLDMPVLLVPGDYPQRNPVDDDGADKPGVITEGGVRETTLGALLPDSFGPENLPPRA

SEQ ID NO: 166 - protein, 163 aa, synthetic construct
  REGION 1..163: note = Description of artificial sequence: pYY-BEM4.53; tr|A0A2D6RD43|A0A2D6RD43_9GAMM polypeptide sequence
MNIENLITENDETLIRRCIELAGESVKNGDKPFGALLAKDGNIIFESSNNAKTKVPYHAEILTLMDAQDKLNTTDLSDYALYSNCEPCPMCSFMIREYKLDKVVFSVHSPYMGGQSRWNILEDDVLTRFKPYFSKPPNVVGGVLESEGKRIFDKVGLWMFGKE

SEQ ID NO: 167 - protein, 204 aa, synthetic construct
  REGION 1..204: note = Description of artificial sequence: pYY-BEM4.54; tr|A0A0H3AVL6|A0A0H3AVL6_BRUO2 polypeptide sequence
MHAKGYSQQERRIIPFANRFRFRELCSNKSLHGLRAKFPEQYTKWDPMRKAASITKANSATPMDIALEEAHAAGERGEVPIGAVIVRDGEIIARAGNRTREFNDVTAHAEILTIRQAGEMLGSERLIDCDLYVTLEPCAMCAAAISFARIRRLYYGASDPKGGGIEHGGRFYTQPTCHHAPEIYPGFCEADARKILKDFFREKR

SEQ ID NO: 168 - protein, 165 aa, synthetic construct
  REGION 1..165: note = Description of artificial sequence: pYY-BEM4.55; tr|A0A242H531|A0A242H531_9ENTE polypeptide sequence
MFIVKNNIEVIQQQAELDAKFMKQALKLAKDASNNGNEPFGAVLVKNDKVILTGENQIHTESDPTYHAELGIIRDFCTSQKITDLSEYTLYTSCEPCCMCAGAMVWSNLDRMVYGLGHDELAEIAGFNIMIGSEEIFSKSPNRPEVAKGVLKEAAVPVYVDYFQR

SEQ ID NO: 169 - protein, 181 aa, synthetic construct
  REGION 1..181: note = Description of artificial sequence: pYY-BEM4.56; tr|A0A2R6XZE2|A0A2R6XZE2_9BACL polypeptide sequence
MSGRISWHEYFMAQAKLIALRATCTRLMVGAVIVRDRRVIAGGYNGSIAGDEHCIDVGCKVRDGHCIRTIHAEQNALMQCAKFGVSTDGAELYVTHFPCLNCTKLLIQAGIRHIYYEVPYRVDPYAIELLEKAGVGTTQITVDLNAYVQVMSKVSTDPALTYVPESKAQKDEYGQSVGKIV

SEQ ID NO: 170 - protein, 173 aa, synthetic construct
  REGION 1..173: note = Description of artificial sequence: pYY-BEM4.57; tr|A0A139SHT6|A0A139SHT6_9BACT polypeptide sequence
MSEANASSESLPSRNSPVELIAEAAGKFGRRPTWDEYFMATAVLISTRSSCERLNVGCVIVTAGESHKNRIVAAGYNGHLPGSPHTSRMRDGHEQATVHAEQNAISDAARRGSSVEGCTAYVTHYPCINCAKILASAGIAKICYRLDYHNDPLVKPMLAEAGIEIVQLGEAAS

SEQ ID NO: 171 - protein, 170 aa, synthetic construct
  REGION 1..170: note = Description of artificial sequence: pYY-BEM4.58; tr|A0A261DBH2|A0A261DBH2_9RICK polypeptide sequence
MVMKKKLITVKRSTEFNNFFMEEALKQAQFALDKNEIPVGAIIVNRITNKVIAKAHNIVEQTKNPVLHAEIVAINQSCQILSSKNLSDCDMYVTLEPCVMCSGAISFARIGRLFYAANDPKQGAIENGGRFFNSKSCFYRPEIYSGFSAKISENLIKEFFYNVRYQKCNP

SEQ ID NO: 172 - protein, 146 aa, synthetic construct
  REGION 1..146: note = Description of artificial sequence: pYY-BEM4.59; tr|A0A2N0XZK6|A0A2N0XZK6_9VIBR polypeptide sequence
MTDNSLHESYMRQAFELSKSALPGCRPNPPVGCVFVKDGEVVSSGFSQPPGNHHAEAGAIAAYTGSYDGLVAYVTLEPCSFQGRTPSCAKALVRVRPEKVYVAILDPDTRNSGAGIKILEDAGIDVEVGLLGEEVASFLNPYLIRN

SEQ ID NO: 173 - protein, 159 aa, synthetic construct
  REGION 1..159: note = Description of artificial sequence: pYY-BEM4.60; tr|A0A1V5R0F9|A0A1V5R0F9_9BACT polypeptide sequence
MTKKETTKLHALDDFCMKKALLLAKRAFRADEVPVGALVVDSSNKVIGRGYNQVEKRKSQRAHAEQLAIEQACKKIGDWRLEGCTLYVTLEPCTMCMGLIKLSRIERVVFGAASPLFGYQLDKNRKSQLYKKGVIKIRKGVGKATAAALLKDFFKNKRM

SEQ ID NO: 174 - protein, 167 aa, synthetic construct
  REGION 1..167: note = Description of artificial sequence: pYY-BEM4.61; tr|A0A2W0H8Y3|A0A2W0H8Y3_9BACI polypeptide sequence
MKNNGRLDHEYFMTEALQEAKEAGQRGDLPIGAVIVHNGRIIARGSNMRKTAGIKISHAENNAMHNCAPYLMKHASECVIYTTLEPCIMCLTTLVMANIDSIVFAADDKYMNMKPFIDANSYIRDRIHQYKGGVCRGESEALLRKYSPYAAELALNGTHPHHRKGGA

SEQ ID NO: 175 - protein, 165 aa, synthetic construct
  REGION 1..165: note = Description of artificial sequence: pYY-BEM4.62; tr|A0A261BDB7|A0A261BDB7_CAERE polypeptide sequence
LYKLYIFRMTTTKANLTQFEQELVDKAVGAMEKAYCKYSGFKVGAALVCEDGEIIIGANHENASYGATICAERSAMVTALTKGHRKFKLLAVATELEAPCSPCGICRQYLIEFGDYKVILGSSTSDQIIETTTYGLLPYAFTPKSLDDHEKEAEERNHQEGEKKH

SEQ ID NO: 176 - protein, 162 aa, synthetic construct
  REGION 1..162: note = Description of artificial sequence: pYY-BEM4.63; tr|A0A2E1PHI6|A0A2E1PHI6_9GAMM polypeptide sequence
MKELLIHSWLMLNSNSKLIMERVIELSEINLKNGKIPIAAVIVDKKNYEIISESQNEDSPIGHAELLAITKALKKLNTNRLDSTNLFVTIEPCPMCAYAISKCHINRLYFGSEDEKGGGVINGPRIFESHNLKKIDYVSHCYHEKTTQLMQSFFQLKRNQQL

SEQ ID NO: 177 - protein, 133 aa, synthetic construct
  REGION 1..133: note = Description of artificial sequence: pYY-BEM4.64; tr|A0A378LUA7|A0A378LUA7_9GAMM polypeptide sequence
MDTIIKKMISNAHNTLAHSYSPYSKFSVASCICTDKDNFYTGVNVENSAYGLAICAETSAISAMVTAGEKRIKSMVVMAGTNILCSPCGACRQRIYEFSTPDTLIHLCDKNSILRTFKINELLPEAFKFDFNP

SEQ ID NO: 178 - protein, 370 aa, synthetic construct
  REGION 1..370: note = Description of artificial sequence: pYY-BEM4.65; tr|A0A139HQ78|A0A139HQ78_9PEZI polypeptide sequence
MADSLKSKPGHARHDTALIHGLSQSDVQKLSESCVDAKSKAYCPYSHFRVGCAVLLANGDVVQGANVENAAYPVGTCAERVALGTAVGAKKGDFRALAVSTDISPPASPCGMCRQFIREFCELNTPILMYDKDGKSVVMTLEQLLPMSFGPDKLLPPGQLENGLMQTQTQSSFVTRAFSTTSSRRQDDTPQVPQSHYDFFPQTFPQGPPPKTSFSPDLKQLRKEFLQLQAKAHPDLAPQDQKRRAEALSMRINEAYKTLQSPLRRAQYLLSQQGIDVEDETAKLDDSSLLMEVMEAREAVEEVEDEEQLNEIRAENNGRIEESVRVLEDAFRDNEFEKAAQEAIRLRYWVNIEESIQGWEKGNGGGILHH

SEQ ID NO: 179 - protein, 165 aa, synthetic construct
  REGION 1..165: note = Description of artificial sequence: pYY-BEM4.66; tr|A0A2A9FXV0|A0A2A9FXV0_9VIBR polypeptide sequence
MCNLKENKDMDKYFHFACDATIEGMREGTGGPFGATLTRNGEVVCSVANTVLKDMDISGHAEMVAVREACKKLDTLDLSDCVMYATCEPCPMCVSVMLWAGIKTCYYASTHLDAAKHGFSDQQLRDYLDGSDTSTLNMVHIEDNRDDCAKIWTEFRHLNETKNDG

SEQ ID NO: 180 - protein, 509 aa, synthetic construct
  REGION 1..509: note = Description of artificial sequence: pYY-BEM4.67; tr|A0A1A8AG96|A0A1A8AG96_NOTFU polypeptide sequence
MEHSDRWSRAEPGLSTSSRETRDGSTQTDCKLQGHGPRLSKVNLFTLLSLWMELFPQEQDEENGQSQIRRSGLVVVREGKVVGLHCSGADLHAGQAAILQHGASLANCQLFFSRRPCATCLKMIINAGVRQITFWPGDPEISMLTSNQTHSQRTSQSITEASLDATAVEKLKSNSRPQICVLMQPLAPGVLQFVDETSRRSDFMERMMDDDPELDSEKLFNSDRLRHLKDFCRHFLIQTDQRHKDILSQMGLKNFCVEPYFSNLRSNMTELVEVLAAVAAGMPQQHYGFYREESLSLDPHPVDVSQAVARHCIVQARLLSYRTEDPKVGVGAVIWAKGQSACCCGTGRLYLIGCGYNAYPAGSKYAEYPQMDNKQEDRERRKYRYIVHAEQNALTFRTRDIKPDECSMLFVTKCPCDECIPLIRGAGVKHIYTSDQDRDKDKGDISYLRFGSLKGVCKFIWQRSPPVSSASSLHLTNGCVGKHVRQAEQQIYKNKKLCTKGSSGSSDIC

SEQ ID NO: 181 - protein, 148 aa, synthetic construct
  REGION 1..148: note = Description of artificial sequence: pYY-BEM4.68; tr|A0A3E2VN88|A0A3E2VN88_9FIRM polypeptide sequence
MEKEITNMDKQKLIQMAVDGLGRSYAPYSHFHVSAALLCADGTVYTGNNIENAAYTPSVCAERCAIFKAVGDGRREFEAIAVCGGPDGVIEDYCPPCGVCRQVMREFCDPSSFRVLVAKTAEDYREYTLEQLLPDGFGPDHLTGSGER

SEQ ID NO: 182 - protein, 221 aa, synthetic construct
  REGION 1..221: note = Description of artificial sequence: pYY-BEM4.69; tr|A0A2D5ZRJ2|A0A2D5ZRJ2_9BACT polypeptide sequence
MARPVHLHTGERRTEEGATESRAVAAVATAITRAPRAPPRPATGRERDGPPPRRVFGGGLRVGDPSGYDRGESKPIGGPLTEKRSDWHSYFMRIAGEVATRATCDRKHVGAVIVRNRTILSTGYNGSIRGMPHCDDVGHDMVDGHCIATIHAEANAILQAARNGVMIQDGSIYITASPCWNCFKLVANAGLKRVYYGEFYRDKRSFEVARRLGIDLMHIEV

SEQ ID NO: 183 - protein, 155 aa, synthetic construct
  REGION 1..155: note = Description of artificial sequence: pYY-BEM4.70; tr|A0A1B8WPS3|A0A1B8WPS3_9BACI polypeptide sequence
MEGVQLIYQFQWGNLIMTVNKEDLYLIDVARNTIKTLYVDGKHHVGAAVRTKTGKIYSAVHLEANIGRVSVCAEAIALGKAISEGESEFDTIVAVRHPDPTQENQKIEVVSPCGICRELISDYGKGTNVILKNKEGYIKTVISDLLPNKYIREDN

SEQ ID NO: 184 - protein, 156 aa, synthetic construct
  REGION 1..156: note = Description of artificial sequence: pYY-BEM4.71; tr|A0A1W5ZQK9|A0A1W5ZQK9_9BACI polypeptide sequence
MNRFMERAVSLAAENVRVGGQPFGAVLVKDDELVAEGVNEMHLNYDVSGHAELLAIRRAQGELQTHDLSGYTMYASGEPCPMCLSAMYFAGIKDVFYCATVEEAAQVGLEKSKNVYDDLQKSKGERSLVMKQMPLEDDQEDPMKLWDERTNHNGTS

SEQ ID NO: 185 - protein, 340 aa, synthetic construct
  REGION 1..340: note = Description of artificial sequence: pYY-BEM4.72; tr|A0A378V0W4|A0A378V0W4_MYCFO polypeptide sequence
MVHAQFDPTARQALAATAVEAKTRKDLTWQQIADAAELSPAFVTAAVLGQHALPARSAEAVAALLGLDDDAALLLQTIPIRGSIPGGIPTDPTIYRFYEMLQVYGTTLKALVHEQFGDGIISAINFKLDVRKVADPEGGERAVITLDGKYLPPNPFDRVRYRGGLMDFAQRTIDIARQNVAEGGRPFATVIVKNGEILAESPNLVAQTHDPTAHAEILAIRKACTRIGTEHLIGATIYVLAQPCPMCLGSLYYCSPDEVVFLTTRDAYEPHYVDDRKYFELNMFYDEFAKPWDQRRLPMRYEPRDAAVDVYKLWQERNGGERRVPGAPTSTRPGKNPRGE

SEQ ID NO: 186 - protein, 157 aa, synthetic construct
  REGION 1..157: note = Description of artificial sequence: pYY-BEM4.73; tr|I3XF03|I3XF03_RHIFR polypeptide sequence
MKQRCMSPKSAQRFWDNDMHNNKDRPMSENELFVAAREAMAKAHAPYSKFPVGAAIRAEDGQIYTGANIENLSFPEGWCAETTAISHMVMAGQRKIMEVAVIAEKLALCPPCGGCRQRLAEFSGASTRIYLCDETGIKKSLALSDLLPHSFETEILG

SEQ ID NO: 187 - protein, 595 aa, synthetic construct
  REGION 1..595: note = Description of artificial sequence: pYY-BEM4.74; tr|F8IEF3|F8IEF3_ALIAT polypeptide sequence
MDAKELETRGWLCMRAVDVIDKKRRGEALAEEELRFLIEGYVAGRIPDYQMSAFLMAVVWRGMTREETLVLTRLLADSGERLDLSGIPGVKVDKHSTGGVGDKATLVVLPLVASIGVPVIKMSGRGLGHTGGTIDKLESIPGFRTDLSVAELVAQVRQVGIALGGQTADLAPADKKLYALRDVTGTVESLPLIASSVMSKKLAGGADAIVLDVKVGDGAFMKSRSDARRLARLMVEIGEAAGRRTVAVLSNMDQPLGCAIGNALEVAEAIRVLSGEGPFDLAEIALALAEEMTVLAGVAATREEARRMLRQSVAEGRALETLRRWIAAQGGDPAVVDDPSRLPQAPVQMPYLPKKAGFVAKLSALAFGLAAMRLGAGRETKEEAIDPSVGIVLHAKVGDRVQTHRPMFTVHARTGEDALRCIQELEAAIQISDDPVEAPPLILARIDRSEALPYADLMDAAREARDRAYVPYSGFAVGAALELADGRMVTGANVENASYGLTNCAERSAVFRAVAEGGPGTKPEIRAVAVIADSPEPVSPCGACRQVLAEFCSPDTPVYLGNLQGDVRETTVGALLPGAFTDAQMANVRRQDKEA

SEQ ID NO: 188 - protein, 153 aa, synthetic construct
  REGION 1..153: note = Description of artificial sequence: pYY-BEM4.75; tr|A0A1G3M638|A0A1G3M638_9SPIR polypeptide sequence
MKTTNINALDKWDLRFLQMAEHVAEWSKDPSTKVGAVIVRPDRTIASVGFNGFARGVRDTVERLWNRELKYPLTVHAELNAILSAHEPVRGHSLYVSPLSPCSNCAGVIIQSGIARVVAKCGQVNNPAQWSESFNLALTAFAEAGVSVILVEH

SEQ ID NO: 189 - protein, 177 aa, synthetic construct
  REGION 1..177: note = Description of artificial sequence: pYY-BEM4.76; tr|A0A3D9LFR2|A0A3D9LFR2_9MICC polypeptide sequence
MEQNDHGSSGAFSDPFEDDIPLTASLPRITGTGSGIDWQRLESTARAAMTRAYVPYSRFPVGAAALVEDGRVVAGCNIENASLGLTLCAECSLVSNLQMSGGGRIVAFYCVDGNGEVLMPCGRCRQLLYEFHAPGMRLMGPDGELTMDEVLPLAFGPADMTHLSDSAASTDDPGRTR

SEQ ID NO: 190 - protein, 172 aa, synthetic construct
  REGION 1..172: note = Description of artificial sequence: pYY-BEM4.77; tr|A0A3B9YGB5|A0A3B9YGB5_9BACT polypeptide sequence
MAKPISKKYRKLIETAKAARKKAYSPYSRYQVGAAVLTESGRIYSGANMENASYGLCMCAERVAIANAVTRGEKVLQAVCVVGKKARPCGACRQVMLEFSTKETELLMVDIDPNARRDTVIRTRVYSMLPNPFDPFESGMLPQHPQNLLRRRKSPQPRRKRRSRPVHREVSR

SEQ ID NO: 191 - protein, 391 aa, synthetic construct
  REGION 1..391: note = Description of artificial sequence: pYY-BEM4.78; tr|A0A182F569|A0A182F569_ANOAL polypeptide sequence
MPRPSQFRVSSSQSLSNSQIQASQSSDSVVDITSYVNAVVKALLNLSCTKTIIKRADLVNIALKGNGRLIGRVLQDANIELKEIYGYELIEVEKSKTMILCSTLAAGSMDELNDANRRRYTFLYLILGYIFMKNGSVPETIVWEFLETLGIEEQQEHNYFGDVRKLYDSLFKQAYLTRTKQALEGLNDDVMLISWGVRSKHEVSKKDILAGFCKVMNRDPVDFKAQYIEANEKDDKMNNNINGTVDGRNTVEYSSLDASVKELIEAAIKVRNNAYCPYSNFAVGAALRTVGGDIVTGCNVENGTFGPSVCAERTAVCKAVSEGHREFTAVAVVAFQETEFTAPCGTCRQTLSEFSRKDIPIYLVKPSPVRVMVTSLFQLLPHAFSPSFLNK

SEQ ID NO: 192 - protein, 151 aa, synthetic construct
  REGION 1..151: note = Description of artificial sequence: pYY-BEM4.79; tr|A0A264Z0D4|A0A264Z0D4_9BACI polypeptide sequence
MEPKKLIEEAIVASKQAYVQYSNFHVGAALLTKDGKLYHGCNIENASYGLTNCAERTAIFKAVSEGEKEFQAIAVVGDTEGPISPCGACRQVLAEFFSPDTVVILANLKGDHVVTNINELLPGFFSSKDLQKKVKNCFEKNALGSSCLRPI

SEQ ID NO: 193 - protein, 229 aa, synthetic construct
  REGION 1..229: note = Description of artificial sequence: pYY-BEM4.80; tr|A0A1L9Q1R3|A0A1L9Q1R3_ASPVE polypeptide sequence
MPLSAEEAALVETATATINSIPLSEDYSVASAAKASDGRVFTGVNVYHFTGGPCAELVVLGVAAAAGAAQLTHIVAVANEQRGILSPCGRCRQVLLDLQPNIQVIVGKEGSEQSVPVAQLLPFSYRQPDQHTPVIFKALTSSGPVVVDFFATWCGPCKAVAPVVGKLSETYTDVRFIQVDVDKARSISQEHDIRAMPTFVLYKDGKLLDKRVVGGNMKELEEQIKAIIA

SEQ ID NO: 194 - protein, 18 aa, synthetic construct
  REGION 1..18: note = Description of artificial sequence: synthetic peptide
KRTADGSEFESPKKKRKV

SEQ ID NO: 195 - protein, 16 aa, synthetic construct
  REGION 1..16: note = Description of artificial sequence: synthetic peptide
KRPAATKKAGQAKKKK

SEQ ID NO: 196 - protein, 17 aa, synthetic construct
  REGION 1..17: note = Description of artificial sequence: synthetic peptide
KKTELQTTNAENKTKKL

SEQ ID NO: 197 - protein, 19 aa, synthetic construct
  REGION 1..19: note = Description of artificial sequence: synthetic peptide
KRGINDRNFWRGENGRKTR

SEQ ID NO: 198 - protein, 16 aa, synthetic construct
  REGION 1..16: note = Description of artificial sequence: synthetic peptide
RKSGKIAAIVVKRPRK

SEQ ID NO: 199 - protein, 7 aa, synthetic construct
  REGION 1..7: note = Description of artificial sequence: synthetic peptide
PKKKRKV

SEQ ID NO: 200 - protein, 30 aa, synthetic construct
  REGION 1..30: note = Description of artificial sequence: synthetic polypeptide
MDSLLMNRRKFLYQFKNVRWAKGRRETYLC

SEQ ID NO: 201 - protein, 1368 aa, Streptococcus pyogenes [sequence omitted]

SEQ ID NO: 202 - DNA, 4104 bp, Streptococcus pyogenes
  misc_feature 1..4104: note = wild type spCas9 polynucleotide sequence
  source 1..4104: mol_type = other DNA
atggataagaaatactcaataggcttagatatcggcacaaatagcgtcggatgggcggtgatcactgatgattataaggttccgtctaaaaagttcaaggttctgggaaatacagaccgccacagtatcaaaaaaaatcttataggggctcttttatttggcagtggagagacagcggaagcgactcgtctcaaacggacagctcgtagaaggtatacacgtcggaagaatcgtatttgttatctacaggagattttttcaaatgagatggcgaaagtagatgatagtttctttcatcgacttgaagagtcttttttggtggaagaagacaagaagcatgaacgtcatcctatttttggaaatatagtagatgaagttgcttatcatgagaaatatccaactatctatcatctgcgaaaaaaattggcagattctactgataaagcggatttgcgcttaatctatttggccttagcgcatatgattaagtttcgtggtcattttttgattgagggagatttaaatcctgataatagtgatgtggacaaactatttatccagttggtacaaatctacaatcaattatttgaagaaaaccctattaacgcaagtagagtagatgctaaagcgattctttctgcacgattgagtaaatcaagacgattagaaaatctcattgctcagctccccggtgagaagagaaatggcttgtttgggaatctcattgctttgtcattgggattgacccctaattttaaatcaaattttgatttggcagaagatgctaaattacagctttcaaaagatacttacgatgatgatttagataatttattggcgcaaattggagatcaatatgctgatttgtttttggcagctaagaatttatcagatgctattttactttcagatatcctaagagtaaatagtgaaataactaaggctcccctatcagcttcaatgattaagcgctacgatgaacatcatcaagacttgactcttttaaaagctttagttcgacaacaacttccagaaaagtataaagaaatcttttttgatcaatcaaaaaacggatatgcaggttatattgatgggggagctagccaagaagaattttataaatttatcaaaccaattttagaaaaaatggatggtactgaggaattattggtgaaactaaatcgtgaagatttgctgcgcaagcaacggacctttgacaacggctctattccccatcaaattcacttgggtgagctgcatgctattttgagaagacaagaagacttttatccatttttaaaagacaatcgtgagaagattgaaaaaatcttgacttttcgaattccttattatgttggtccattggcgcgtggcaatagtcgttttgcatggatgactcggaagtctgaagaaacaattaccccatggaattttgaagaagttgtcgataaaggtgcttcagctcaatcatttattgaacgcatgacaaactttgataaaaatcttccaaatgaaaaagtactaccaaaacatagtttgctttatgagtattttacggtttataacgaattgacaaaggtcaaatatgttactgagggaatgcgaaaaccagcatttctttcaggtgaacagaagaaagccattgttgatttactcttcaaaacaaatcgaaaagtaaccgttaagcaattaaaagaagattatttcaaaaaaatagaatgttttgatagtgttgaaatttcaggagttgaagatagatttaatgcttcattaggcgcctaccatgatttgctaaaaattattaaagataaagattttttggataatgaagaaaatgaagatatcttagaggatattgttttaacattgaccttatttgaagatagggggatgattgaggaaagacttaaaacatatgctcacctctttgatgataaggtgatgaaacagcttaaacgtcgccgttatactggttggggacgtttgtctcgaaaattgattaatggtattagggataagcaatctggcaaaacaatattagattttttgaaatcagatggttttgccaatcgcaattttatgcagctgatccatgatgatagtttgacatttaaagaagatattcaaaaagcacaggtgtctggacaaggccatagtttacatgaacagattgctaacttagctggcagtcctgctattaaaaaaggtattttacagactgtaaaaattgttgatgaactggtcaaagtaatggggcataagccagaaaatatcgttattgaaatggcacgtgaaaatcagacaactcaaaagggccagaaaaattcgcgagagcgtatgaaacgaatcgaagaaggtatcaaagaattaggaagtcagattcttaaagagcatcctgttgaaaatactcaattgcaaaatgaaaagctctatctctattatctacaaaatggaagagacatgtatgtggaccaagaattagatattaatcgtttaagtgattatgatgtcgatcacattgttccacaaagtttcattaaagacgattcaatagacaataaggtactaacgcgttctgataaaaatcgtggtaaatcggataacgttccaagtgaagaagtagtcaaaaagatgaaaaactattggagacaacttctaaacgccaagttaatcactcaacgtaagtttgataatttaacgaaagctgaacgtggaggtttgagtgaacttgataaagctggttttatcaaacgccaattggttgaaactcgccaaatcactaagcatgtggcacaaattttggatagtcgcatgaatactaaatacgatgaaaatgataaacttattcgagaggttaaagtgattaccttaaaatctaaattagtttctgacttccgaaaagatttccaattctataaagtacgtgagattaacaattaccatcatgcccatgatgcgtatctaaatgccgtcgttggaactgctttgattaagaaatatccaaaacttgaatcggagtttgtctatggtgattataaagtttatgatgttcgtaaaatgattgctaagtctgagcaagaaataggcaaagcaaccgcaaaatatttcttttactctaatatcatgaacttcttcaaaacagaaattacacttgcaaatggagagattcgcaaacgccctctaatcgaaactaatggggaaactggagaaattgtctgggataaagggcgagattttgccacagtgcgcaaagtattgtccatgccccaagtcaatattgtcaagaaaacagaagtacagacaggcggattctccaaggagtcaattttaccaaaaagaaattcggacaagcttattgctcgtaaaaaagactgggatccaaaaaaatatggtggttttgatagtccaacggtagcttattcagtcctagtggttgctaaggtggaaaaagggaaatcgaagaagttaaaatccgttaaagagttactagggatcacaattatggaaagaagttcctttgaaaaaaatccgattgactttttagaagctaaaggatataaggaagttaaaaaagacttaatcattaaactacctaaatatagtctttttgagttagaaaacggtcgtaaacggatgctggctagtgccggagaattacaaaaaggaaatgagctggctctgccaagcaaatatgtgaattttttatatttagctagtcattatgaaaagttgaagggtagtccagaagataacgaacaaaaacaattgtttgtggagcagcataagcattatttagatgagattattgagcaaatcagtgaattttctaagcgtgttattttagcagatgccaatttagataaagttcttagtgcatataacaaacatagagacaaaccaatacgtgaacaagcagaaaatattattcatttatttacgttgacgaatcttggagctcccgctgcttttaaatattttgatacaacaattgatcgtaaacgatatacgtctacaaaagaagttttagatgccactcttatccatcaatccatcactggtctttatgaaacacgcattgatttgagtcagctaggaggtgactga

SEQ ID NO: 203 - protein, 1367 aa, Streptococcus pyogenes
  REGION 1..1367: note = MISC_FEATURE - spCas9 polypeptide sequence
MDKKYSIGLDIGTNSVGWAVITDDYKVPSKKFKVLGNTDRHSIKKNLIGALLFGSGETAEATRLKRTARRRYTRRKNRICYLQEIFSNEMAKVDDSFFHRLEESFLVEEDKKHERHPIFGNIVDEVAYHEKYPTIYHLRKKLADSTDKADLRLIYLALAHMIKFRGHFLIEGDLNPDNSDVDKLFIQLVQIYNQLFEENPINASRVDAKAILSARLSKSRRLENLIAQLPGEKRNGLFGNLIALSLGLTPNFKSNFDLAEDAKLQLSKDTYDDDLDNLLAQIGDQYADLFLAAKNLSDAILLSDILRVNSEITKAPLSASMIKRYDEHHQDLTLLKALVRQQLPEKYKEIFFDQSKNGYAGYIDGGASQEEFYKFIKPILEKMDGTEELLVKLNREDLLRKQRTFDNGSIPHQIHLGELHAILRRQEDFYPFLKDNREKIEKILTFRIPYYVGPLARGNSRFAWMTRKSEETITPWNFEEVVDKGASAQSFIERMTNFDKNLPNEKVLPKHSLLYEYFTVYNELTKVKYVTEGMRKPAFLSGEQKKAIVDLLFKTNRKVTVKQLKEDYFKKIECFDSVEISGVEDRFNASLGAYHDLLKIIKDKDFLDNEENEDILEDIVLTLTLFEDRGMIEERLKTYAHLFDDKVMKQLKRRRYTGWGRLSRKLINGIRDKQSGKTILDFLKSDGFANRNFMQLIHDDSLTFKEDIQKAQVSGQGHSLHEQIANLAGSPAIKKGILQTVKIVDELVKVMGHKPENIVIEMARENQTTQKGQKNSRERMKRIEEGIKELGSQILKEHPVENTQLQNEKLYLYYLQNGRDMYVDQELDINRLSDYDVDHIVPQSFIKDDSIDNKVLTRSDKNRGKSDNVPSEEVVKKMKNYWRQLLNAKLITQRKFDNLTKAERGGLSELDKAGFIKRQLVETRQITKHVAQILDSRMNTKYDENDKLIREVKVITLKSKLVSDFRKDFQFYKVREINNYHHAHDAYLNAVVGTALIKKYPKLESEFVYGDYKVYDVRKMIAKSEQEIGKATAKYFFYSNIMNFFKTEITLANGEIRKRPLIETNGETGEIVWDKGRDFATVRKVLSMPQVNIVKKTEVQTGGFSKESILPKRNSDKLIARKKDWDPKKYGGFDSPTVAYSVLVVAKVEKGKSKKLKSVKELLGITIMERSSFEKNPIDFLEAKGYKEVKKDLIIKLPKYSLFELENGRKRMLASAGELQKGNELALPSKYVNFLYLASHYEKLKGSPEDNEQKQLFVEQHKHYLDEIIEQISEFSKRVILADANLDKVLSAYNKHRDKPIREQAENIIHLFTLTNLGAPAAFKYFDTTIDRKRYTSTKEVLDATLIHQSITGLYETRIDLSQLGGD

SEQ ID NO: 204 - DNA, 4212 bp, synthetic construct
  misc_feature 1..4212: note = Description of artificial sequence: wild-type Cas9 polynucleotide sequence
  misc_feature 5..58: note = RuvC domain
  misc_feature 718..764: note = RuvC domain
  misc_feature 772..901: note = HNH domain
  misc_feature 906..1101: note = RuvC domain
  source 1..4212: mol_type = other DNA
atggataaaaagtattctattggtttagacatcggcactaattccgttggatgggctgtcataaccgatgaatacaaagtaccttcaaagaaatttaaggtgttggggaacacagaccgtcattcgattaaaaagaatcttatcggtgccctcctattcgatagtggcgaaacggcagaggcgactcgcctgaaacgaaccgctcggagaaggtatacacgtcgcaagaaccgaatatgttacttacaagaaatttttagcaatgagatggccaaagttgacgattctttctttcaccgtttggaagagtccttccttgtcgaagaggacaagaaacatgaacggcaccccatctttggaaacatagtagatgaggtggcatatcatgaaaagtacccaacgatttatcacctcagaaaaaagctagttgactcaactgataaagcggacctgaggttaatctacttggctcttgcccatatgataaagttccgtgggcactttctcattgagggtgatctaaatccggacaactcggatgtcgacaaactgttcatccagttagtacaaacctataatcagttgtttgaagagaaccctataaatgcaagtggcgtggatgcgaaggctattcttagcgcccgcctctctaaatcccgacggctagaaaacctgatcgcacaattacccggagagaagaaaaatgggttgttcggtaaccttatagcgctctcactaggcctgacaccaaattttaagtcgaacttcgacttagctgaagatgccaaattgcagcttagtaaggacacgtacgatgacgatctcgacaatctactggcacaaattggagatcagtatgcggacttatttttggctgccaaaaaccttagcgatgcaatcctcctatctgacatactgagagttaatactgagattaccaaggcgccgttatccgcttcaatgatcaaaaggtacgatgaacatcaccaagacttgacacttctcaaggccctagtccgtcagcaactgcctgagaaatataaggaaatattctttgatcagtcgaaaaacgggtacgcaggttatattgacggcggagcgagtcaagaggaattctacaagtttatcaaacccatattagagaagatggatgggacggaagagttgcttgtaaaactcaatcgcgaagatctactgcgaaagcagcggactttcgacaacggtagcattccacatcaaatccacttaggcgaattgcatgctatacttagaaggcaggaggatttttatccgttcctcaaagacaatcgtgaaaagattgagaaaatcctaacctttcgcataccttactatgtgggacccctggcccgagggaactctcggttcgcatggatgacaagaaagtccgaagaaacgattactccatggaattttgaggaagttgtcgataaaggtgcgtcagctcaatcgttcatcgagaggatgaccaactttgacaagaatttaccgaacgaaaaagtattgcctaagcacagtttactttacgagtatttcacagtgtacaatgaactcacgaaagttaagtatgtcactgagggcatgcgtaaacccgcctttctaagcggagaacagaagaaagcaatagtagatctgttattcaagaccaaccgcaaagtgacagttaagcaattgaaagaggactactttaagaaaattgaatgcttcgattctgtcgagatctccggggtagaagatcgatttaatgcgtcacttggtacgtatcatgacctcctaaagataattaaagataaggacttcctggataacgaagagaatgaagatatcttagaagatatagtgttgactcttaccctctttgaagatcgggaaatgattgaggaaagactaaaaacatacgctcacctgttcgacgataaggttatgaaacagttaaagaggcgtcgctatacgggctggggacgattgtcgcggaaacttatcaacgggataagagacaagcaaagtggtaaaactattctcgattttctaaagagcgacggcttcgccaataggaactttatgcagctgatccatgatgactctttaaccttcaaagaggatatacaaaaggcacaggtttccggacaaggggactcattgcacgaacatattgcgaatcttgctggttcgccagccatcaaaaagggcatactccagacagtcaaagtagtggatgagctagttaaggtcatgggacgtcacaaaccggaaaacattgtaatcgagatggcacgcgaaaatcaaacgactcagaaggggcaaaaaaacagtcgagagcggatgaagagaatagaagagggtattaaagaactgggcagccagatcttaaaggagcatcctgtggaaaatacccaattgcagaacgagaaactttacctctattacctacaaaatggaagggacatgtatgttgatcaggaactggacataaaccgtttatctgattacgacgtcgatcacattgtaccccaatcctttttgaaggacgattcaatcgacaataaagtgcttacacgctcggataagaaccgagggaaaagtgacaatgttccaagcgaggaagtcgtaaagaaaatgaagaactattggcggcagctcctaaatgcgaaactgataacgcaaagaaagttcgataacttaactaaagctgagaggggtggcttgtctgaacttgacaaggccggatttattaaacgtcagctcgtggaaacccgccaaatcacaaagcatgttgcacagatactagattcccgaatgaatacgaaatacgacgagaacgataagctgattcgggaagtcaaagtaatcactttaaagtcaaaattggtgtcggacttcagaaaggattttcaattctataaagttagggagataaataactaccaccatgcgcacgacgcttatcttaatgccgtcgtagggaccgcactcattaagaaatacccgaagctagaaagtgagtttgtgtatggtgattacaaagtttatgacgtccgtaagatgatcgcgaaaagcgaacaggagataggcaaggctacagccaaatacttcttttattctaacattatgaatttctttaagacggaaatcactctggcaaacggagagatacgcaaacgacctttaattgaaaccaatggggagacaggtgaaatcgtatgggataagggccgggacttcgcgacggtgagaaaagttttgtccatgccccaagtcaacatagtaaagaaaactgaggtgcagaccggagggttttcaaaggaatcgattcttccaaaaaggaatagtgataagctcatcgctcgtaaaaaggactgggacccgaaaaagtacggtggcttcgatagccctacagttgcctattctgtcctagtagtggcaaaagttgagaagggaaaatccaagaaactgaagtcagtcaaagaattattggggataacgattatggagcgctcgtcttttgaaaagaaccccatcgacttccttgaggcgaaaggttacaaggaagtaaaaaaggatctcataattaaactaccaaagtatagtctgtttgagttagaaaatggccgaaaacggatgttggctagcgccggagagcttcaaaaggggaacgaactcgcactaccgtctaaatacgtgaatttcctgtatttagcgtcccattacgagaagttgaaaggttcacctgaagataacgaacagaagcaactttttgttgagcagcacaaacattatctcgacgaaatcatagagcaaatttcggaattcagtaagagagtcatcctagctgatgccaatctggacaaagtattaagcgcatacaacaagcacagggataaacccatacgtgagcaggcggaaaatattatccatttgtttactcttaccaacctcggcgctccagccgcattcaagtattttgacacaacgatagatcgcaaacgatacacttctaccaaggaggtgctagacgcgacactgattcaccaatccatcacgggattatatgaaactcggatagatttgtcacagcttgggggtgacggatcccccaagaagaagaggaaagtctcgagcgactacaaagaccatgacggtgattataaagatcatgacatcgattacaaggatgacgatgacaaggctgcagga

SEQ ID NO: 205 - protein, 1368 aa, synthetic construct
  REGION 1..1368: note = Description of artificial sequence: exemplary catalytically active Cas9 nickase (nCas9) polypeptide sequence
MDKKYSIGLAIGTNSVGWAVITDEYKVPSKKFKVLGNTDRHSIKKNLIGALLFDSGETAEATRLKRTARRRYTRRKNRICYLQEIFSNEMAKVDDSFFHRLEESFLVEEDKKHERHPIFGNIVDEVAYHEKYPTIYHLRKKLVDSTDKADLRLIYLALAHMIKFRGHFLIEGDLNPDNSDVDKLFIQLVQTYNQLFEENPINASGVDAKAILSARLSKSRRLENLIAQLPGEKKNGLFGNLIALSLGLTPNFKSNFDLAEDAKLQLSKDTYDDDLDNLLAQIGDQYADLFLAAKNLSDAILLSDILRVNTEITKAPLSASMIKRYDEHHQDLTLLKALVRQQLPEKYKEIFFDQSKNGYAGYIDGGASQEEFYKFIKPILEKMDGTEELLVKLNREDLLRKQRTFDNGSIPHQIHLGELHAILRRQEDFYPFLKDNREKIEKILTFRIPYYVGPLARGNSRFAWMTRKSEETITPWNFEEVVDKGASAQSFIERMTNFDKNLPNEKVLPKHSLLYEYFTVYNELTKVKYVTEGMRKPAFLSGEQKKAIVDLLFKTNRKVTVKQLKEDYFKKIECFDSVEISGVEDRFNASLGTYHDLLKIIKDKDFLDNEENEDILEDIVLTLTLFEDREMIEERLKTYAHLFDDKVMKQLKRRRYTGWGRLSRKLINGIRDKQSGKTILDFLKSDGFANRNFMQLIHDDSLTFKEDIQKAQVSGQGDSLHEHIANLAGSPAIKKGILQTVKVVDELVKVMGRHKPENIVIEMARENQTTQKGQKNSRERMKRIEEGIKELGSQILKEHPVENTQLQNEKLYLYYLQNGRDMYVDQELDINRLSDYDVDHIVPQSFLKDDSIDNKVLTRSDKNRGKSDNVPSEEVVKKMKNYWRQLLNAKLITQRKFDNLTKAERGGLSELDKAGFIKRQLVETRQITKHVAQILDSRMNTKYDENDKLIREVKVITLKSKLVSDFRKDFQFYKVREINNYHHAHDAYLNAVVGTALIKKYPKLESEFVYGDYKVYDVRKMIAKSEQEIGKATAKYFFYSNIMNFFKTEITLANGEIRKRPLIETNGETGEIVWDKGRDFATVRKVLSMPQVNIVKKTEVQTGGFSKESILPKRNSDKLIARKKDWDPKKYGGFDSPTVAYSVLVVAKVEKGKSKKLKSVKELLGITIMERSSFEKNPIDFLEAKGYKEVKKDLIIKLPKYSLFELENGRKRMLASAGELQKGNELALPSKYVNFLYLASHYEKLKGSPEDNEQKQLFVEQHKHYLDEIIEQISEFSKRVILADANLDKVLSAYNKHRDKPIREQAENIIHLFTLTNLGAPAAFKYFDTTIDRKRYTSTKEVLDATLIHQSITGLYETRIDLSQLGGD

SEQ ID NO: 206 - DNA, 4107 bp, Streptococcus pyogenes
  misc_feature 1..4107: note = Cas9 from Streptococcus pyogenes (NCBI Ref. Seq.: NC_002737.2) polynucleotide sequence
  source 1..4107: mol_type = other DNA
atggataagaaatactcaataggcttagatatcggcacaaatagcgtcggatgggcggtgatcactgatgaatataaggttccgtctaaaaagttcaaggttctgggaaatacagaccgccacagtatcaaaaaaaatcttataggggctcttttatttgacagtggagagacagcggaagcgactcgtctcaaacggacagctcgtagaaggtatacacgtcggaagaatcgtatttgttatctacaggagattttttcaaatgagatggcgaaagtagatgatagtttctttcatcgacttgaagagtcttttttggtggaagaagacaagaagcatgaacgtcatcctatttttggaaatatagtagatgaagttgcttatcatgagaaatatccaactatctatcatctgcgaaaaaaattggtagattctactgataaagcggatttgcgcttaatctatttggccttagcgcatatgattaagtttcgtggtcattttttgattgagggagatttaaatcctgataatagtgatgtggacaaactatttatccagttggtacaaacctacaatcaattatttgaagaaaaccctattaacgcaagtggagtagatgctaaagcgattctttctgcacgattgagtaaatcaagacgattagaaaatctcattgctcagctccccggtgagaagaaaaatggcttatttgggaatctcattgctttgtcattgggtttgacccctaattttaaatcaaattttgatttggcagaagatgctaaattacagctttcaaaagatacttacgatgatgatttagataatttattggcgcaaattggagatcaatatgctgatttgtttttggcagctaagaatttatcagatgctattttactttcagatatcctaagagtaaatactgaaataactaaggctcccctatcagcttcaatgattaaacgctacgatgaacatcatcaagacttgactcttttaaaagctttagttcgacaacaacttccagaaaagtataaagaaatcttttttgatcaatcaaaaaacggatatgcaggttatattgatgggggagctagccaagaagaattttataaatttatcaaaccaattttagaaaaaatggatggtactgaggaattattggtgaaactaaatcgtgaagatttgctgcgcaagcaacggacctttgacaacggctctattccccatcaaattcacttgggtgagctgcatgctattttgagaagacaagaagacttttatccatttttaaaagacaatcgtgagaagattgaaaaaatcttgacttttcgaattccttattatgttggtccattggcgcgtggcaatagtcgttttgcatggatgactcggaagtctgaagaaacaattaccccatggaattttgaagaagttgtcgataaaggtgcttcagctcaatcatttattgaacgcatgacaaactttgataaaaatcttccaaatgaaaaagtactaccaaaacatagtttgctttatgagtattttacggtttataacgaattgacaaaggtcaaatatgttactgaaggaatgcgaaaaccagcatttctttcaggtgaacagaagaaagccattgttgatttactcttcaaaacaaatcgaaaagtaaccgttaagcaattaaaagaagattatttcaaaaaaatagaatgttttgatagtgttgaaatttcaggagttgaagatagatttaatgcttcattaggtacctaccatgatttgctaaaaattattaaagataaagattttttggataatgaagaaaatgaagatatcttagaggatattgttttaacattgaccttatttgaagatagggagatgattgaggaaagacttaaaacatatgctcacctctttgatgataaggtgatgaaacagcttaaacgtcgccgttatactggttggggacgtttgtctcgaaaattgattaatggtattagggataagcaatctggcaaaacaatattagattttttgaaatcagatggttttgccaatcgcaattttatgcagctgatccatgatgatagtttgacatttaaagaagacattcaaaaagcacaagtgtctggacaaggcgatagtttacatgaacatattgcaaatttagctggtagccctgctattaaaaaaggtattttacagactgtaaaagttgttgatgaattggtcaaagtaatggggcggcataagccagaaaatatcgttattgaaatggcacgtgaaaatcagacaactcaaaagggccagaaaaattcgcgagagcgtatgaaacgaatcgaagaaggtatcaaagaattaggaagtcagattcttaaagagcatcctgttgaaaatactcaattgcaaaatgaaaagctctatctctattatctccaaaatggaagagacatgtatgtggaccaagaattagatattaatcgtttaagtgattatgatgtcgatcacattgttccacaaagtttccttaaagacgattcaatagacaataaggtcttaacgcgttctgataaaaatcgtggtaaatcggataacgttccaagtgaagaagtagtcaaaaagatgaaaaactattggagacaacttctaaacgccaagttaatcactcaacgtaagtttgataatttaacgaaagctgaacgtggaggtttgagtgaacttgataaagctggttttatcaaacgccaattggttgaaactcgccaaatcactaagcatgtggcacaaattttggatagtcgcatgaatactaaatacgatgaaaatgataaacttattcgagaggttaaagtgattaccttaaaatctaaattagtttctgacttccgaaaagatttccaattctataaagtacgtgagattaacaattaccatcatgcccatgatgcgtatctaaatgccgtcgttggaactgctttgattaagaaatatccaaaacttgaatcggagtttgtctatggtgattataaagtttatgatgttcgtaaaatgattgctaagtctgagcaagaaataggcaaagcaaccgcaaaatatttcttttactctaatatcatgaacttcttcaaaacagaaattacacttgcaaatggagagattcgcaaacgccctctaatcgaaactaatggggaaactggagaaattgtctgggataaagggcgagattttgccacagtgcgcaaagtattgtccatgccccaagtcaatattgtcaagaaaacagaagtacagacaggcggattctccaaggagtcaattttaccaaaaagaaattcggacaagcttattgctcgtaaaaaagactgggatccaaaaaaatatggtggttttgatagtccaacggtagcttattcagtcctagtggttgctaaggtggaaaaagggaaatcgaagaagttaaaatccgttaaagagttactagggatcacaattatggaaagaagttcctttgaaaaaaatccgattgactttttagaagctaaaggatataaggaagttaaaaaagacttaatcattaaactacctaaatatagtctttttgagttagaaaacggtcgtaaacggatgctggctagtgccggagaattacaaaaaggaaatgagctggctctgccaagcaaatatgtgaattttttatatttagctagtcattatgaaaagttgaagggtagtccagaagataacgaacaaaaacaattgtttgtggagcagcataagcattatttagatgagattattgagcaaatcagtgaattttctaagcgtgttattttagcagatgccaatttagataaagttcttagtgcatataacaaacatagagacaaaccaatacgtgaacaagcagaaaatattattcatttatttacgttgacgaatcttggagctcccgctgcttttaaatattttgatacaacaattgatcgtaaacgatatacgtctacaaaagaagttttagatgccactcttatccatcaatccatcactggtctttatgaaacacgcattgatttgagtcagctaggaggtgactga

SEQ ID NO: 207 - protein, 1368 aa, synthetic construct
  REGION 1..1368: note = Description of sequence: catalytically inactive Cas9 (dCas9) polypeptide sequence
  REGION 5..58: note = MISC_FEATURE - RuvC domain
  REGION 718..764: note = MISC_FEATURE - RuvC domain
  REGION 773..902: note = MISC_FEATURE - HNH domain
  REGION 907..1102: note = MISC_FEATURE - RuvC domain
MDKKYSIGLAIGTNSVGWAVITDEYKVPSKKFKVLGNTDRHSIKKNLIGALLFDSGETAEATRLKRTARRRYTRRKNRICYLQEIFSNEMAKVDDSFFHRLEESFLVEEDKKHERHPIFGNIVDEVAYHEKYPTIYHLRKKLVDSTDKADLRLIYLALAHMIKFRGHFLIEGDLNPDNSDVDKLFIQLVQTYNQLFEENPINASGVDAKAILSARLSKSRRLENLIAQLPGEKKNGLFGNLIALSLGLTPNFKSNFDLAEDAKLQLSKDTYDDDLDNLLAQIGDQYADLFLAAKNLSDAILLSDILRVNTEITKAPLSASMIKRYDEHHQDLTLLKALVRQQLPEKYKEIFFDQSKNGYAGYIDGGASQEEFYKFIKPILEKMDGTEELLVKLNREDLLRKQRTFDNGSIPHQIHLGELHAILRRQEDFYPFLKDNREKIEKILTFRIPYYVGPLARGNSRFAWMTRKSEETITPWNFEEVVDKGASAQSFIERMTNFDKNLPNEKVLPKHSLLYEYFTVYNELTKVKYVTEGMRKPAFLSGEQKKAIVDLLFKTNRKVTVKQLKEDYFKKIECFDSVEISGVEDRFNASLGTYHDLLKIIKDKDFLDNEENEDILEDIVLTLTLFEDREMIEERLKTYAHLFDDKVMKQLKRRRYTGWGRLSRKLINGIRDKQSGKTILDFLKSDGFANRNFMQLIHDDSLTFKEDIQKAQVSGQGDSLHEHIANLAGSPAIKKGILQTVKVVDELVKVMGRHKPENIVIEMARENQTTQKGQKNSRERMKRIEEGIKELGSQILKEHPVENTQLQNEKLYLYYLQNGRDMYVDQELDINRLSDYDVDAIVPQSFLKDDSIDNKVLTRSDKNRGKSDNVPSEEVVKKMKNYWRQLLNAKLITQRKFDNLTKAERGGLSELDKAGFIKRQLVETRQITKHVAQILDSRMNTKYDENDKLIREVKVITLKSKLVSDFRKDFQFYKVREINNYHHAHDAYLNAVVGTALIKKYPKLESEFVYGDYKVYDVRKMIAKSEQEIGKATAKYFFYSNIMNFFKTEITLANGEIRKRPLIETNGETGEIVWDKGRDFATVRKVLSMPQVNIVKKTEVQTGGFSKESILPKRNSDKLIARKKDWDPKKYGGFDSPTVAYSVLVVAKVEKGKSKKLKSVKELLGITIMERSSFEKNPIDFLEAKGYKEVKKDLIIKLPKYSLFELENGRKRMLASAGELQKGNELALPSKYVNFLYLASHYEKLKGSPEDNEQKQLFVEQHKHYLDEIIEQISEFSKRVILADANLDKVLSAYNKHRDKPIREQAENIIHLFTLTNLGAPAAFKYFDTTIDRKRYTSTKEVLDATLIHQSITGLYETRIDLSQLGGD

SEQ ID NO: 208 - protein, 345 aa, Sulfolobus islandicus
  REGION 1..345: note = MISC_FEATURE - tr|F0NN87|F0NN87_SULIHCRISPR-associatedCasx protein OS = Sulfolobus islandicus (strain HVE10/4) GN = SiH_0402 PE=4; SV = 1); CasX polypeptide sequence
MEVPLYNIFGDNYIIQVATEAENSTIYNNKVEIDDEELRNVLNLAYKIAKNNEDAAAERRGKAKKKKGEEGETTTSNIILPLSGNDKNPWTETLKCYNFPTTVALSEVFKNFSQVKECEEVSAPSFVKPEFYEFGRSPGMVERTRRVKLEVEPHYLIIAAAGWVLTRLGKAKVSEGDYVGVNVFTPTRGILYSLIQNVNGIVPGIKPETAFGLWIARKVVSSVTNPNVSVVRIYTISDAVGQNPTTINGGFSIDLTKLLEKRYLLSERLEAIARNALSISSNMRERYIVLANYIYEYLTGSKRLEDLLYFANRDLIMNLNSDDGKVRDLKLISAYVNGELIRGEG

SEQ ID NO: 209 - protein, 345 aa, Sulfolobus islandicus
  REGION 1..345: note = MISC_FEATURE - tr|F0NH53|F0NH53_SULIR CRISPR associated protein, Casx OS = Sulfolobus islandicus (strain REY15A) GN=SiRe_0771 PE=4 SV=1); CasX polypeptide sequence
MEVPLYNIFGDNYIIQVATEAENSTIYNNKVEIDDEELRNVLNLAYKIAKNNEDAAAERRGKAKKKKGEEGETTTSNIILPLSGNDKNPWTETLKCYNFPTTVALSEVFKNFSQVKECEEVSAPSFVKPEFYKFGRSPGMVERTRRVKLEVEPHYLIMAAAGWVLTRLGKAKVSEGDYVGVNVFTPTRGILYSLIQNVNGIVPGIKPETAFGLWIARKVVSSVTNPNVSVVSIYTISDAVGQNPTTINGGFSIDLTKLLEKRDLLSERLEAIARNALSISSNMRERYIVLANYIYEYLTGSKRLEDLLYFANRDLIMNLNSDDGKVRDLKLISAYVNGELIRGEG

SEQ ID NO: 210 - protein, 987 aa, unidentified
  REGION 1..987: note = MISC_FEATURE - CasX polypeptide sequence
  source 1..987: note = Deltaproteobacteria
MEKRINKIRKKLSADNATKPVSRSGPMKTLLVRVMTDDLKKRLEKRRKKPEVMPQVISNNAANNLRMLLDDYTKMKEAILQVYWQEFKDDHVGLMCKFAQPASKKIDQNKLKPEMDEKGNLTTAGFACSQCGQPLFVYKLEQVSEKGKAYTNYFGRCNVAEHEKLILLAQLKPVKDSDEAVTYSLGKFGQRALDFYSIHVTKESTHPVKPLAQIAGNRYASGPVGKALSDACMGTIASFLSKYQDIIIEHQKVVKGNQKRLESLRELAGKENLEYPSVTLPPQPHTKEGVDFAYNEVIARVRMWVNLNLWQKLKLSRDDAKPLLRLKGFPSFPVVERRENEVDWWNTINEVKKLIDAKRDMGRVFWSGVTAEKRNTILEGYNYLPNENDHKKREGSLENPKKPAKRQFGDLLLYLEKKYAGDWGKVFDEAWERIDKKIAGLTSHIEREEARNAEDAQSKAVLTDWLRAKASFVLERLKEMDEKEFYACEIQLQKWYGDLRGNPFAVEAENRVVDISGFSIGSDGHSIQYRNLLAWKYLENGKREFYLLMNYGKKGRIRFTDGTDIKKSGKWQGLLYGGGKAKVIDLTFDPDDEQLIILPLAFGTRQGREFIWNDLLSLETGLIKLANGRVIEKTIYNKKIGRDEPALFVALTFERREVVDPSNIKPVNLIGVARGENIPAVIALTDPEGCPLPEFKDSSGGPTDILRIGEGYKEKQRAIQAAKEVEQRRAGGYSRKFASKSRNLADDMVRNSARDLFYHAVTHDAVLVFANLSRGFGRQGKRTFMTERQYTKMEDWLTAKLAYEGLTSKTYLSKTLAQYTSKTCSNCGFTITYADMDVMLVRLKKTSDGWATTLNNKELKAEYQITYYNRYKRQTVEKELSAELDRLSEESGNNDISKWTKGRRDEALFLLKKRFSHRPVQEQFVCLDCGHEVHAAEQAALNIARSWLFLNSNSTEFKSYKSGKQPFVGAWQAFYKRRLKEVWKPNA

SEQ ID NO: 211 - protein, 1210 aa, unidentified
  REGION 1..1210: note = MISC_FEATURE - APG80656.1 CRISPR-associated protein CasY [uncultured Parcubacteria group bacterium]; CasY polypeptide sequence
  source 1..1210: note = Parcubacteria group bacterium
MSKRHPRISGVKGYRLHAQRLEYTGKSGAMRTIKYPLYSSPSGGRTVPREIVSAINDDYVGLYGLSNFDDLYNAEKRNEEKVYSVLDFWYDCVQYGAVFSYTAPGLLKNVAEVRGGSYELTKTLKGSHLYDELQIDKVIKFLNKKEISRANGSLDKLKKDIIDCFKAEYRERHKDQCNKLADDIKNAKKDAGASLGERQKKLFRDFFGISEQSENDKPSFTNPLNLTCCLLPFDTVNNNRNRGEVLFNKLKEYAQKLDKNEGSLEMWEYIGIGNSGTAFSNFLGEGFLGRLRENKITELKKAMMDITDAWRGQEQEEELEKRLRILAALTIKLREPKFDNHWGGYRSDINGKLSSWLQNYINQTVKIKEDLKGHKKDLKKAKEMINRFGESDTKEEAVVSSLLESIEKIVPDDSADDEKPDIPAIAIYRRFLSDGRLTLNRFVQREDVQEALIKERLEAEKKKKPKKRKKKSDAEDEKETIDFKELFPHLAKPLKLVPNFYGDSKRELYKKYKNAAIYTDALWKAVEKIYKSAFSSSLKNSFFDTDFDKDFFIKRLQKIFSVYRRFNTDKWKPIVKNSFAPYCDIVSLAENEVLYKPKQSRSRKSAAIDKNRVRLPSTENIAKAGIALARELSVAGFDWKDLLKKEEHEEYIDLIELHKTALALLLAVTETQLDISALDFVENGTVKDFMKTRDGNLVLEGRFLEMFSQSIVFSELRGLAGLMSRKEFITRSAIQTMNGKQAELLYIPHEFQSAKITTPKEMSRAFLDLAPAEFATSLEPESLSEKSLLKLKQMRYYPHYFGYELTRTGQGIDGGVAENALRLEKSPVKKREIKCKQYKTLGRGQNKIVLYVRSSYYQTQFLEWFLHRPKNVQTDVAVSGSFLIDEKKVKTRWNYDALTVALEPVSGSERVFVSQPFTIFPEKSAEEEGQRYLGIDIGEYGIAYTALEITGDSAKILDQNFISDPQLKTLREEVKGLKLDQRRGTFAMPSTKIARIRESLVHSLRNRIHHLALKHKAKIVYELEVSRFEEGKQKIKKVYATLKKADVYSEIDADKNLQTTVWGKLAVASEISASYTSQFCGACKKLWRAEMQVDETITTQELIGTVRVIKGGTLIDAIKDFMRPPIFDENDTPFPKYRDFCDKHHISKKMRGNSCLFICPFCRANADADIQASQTIALLRYVKEEKKVEDYFERFRKLKNIKVLGQMKKI

SEQ ID NO: 212 - protein, 1082 aa, Neisseria meningitidis
  REGION 1..1082: note = MISC_FEATURE - NCBI Reference: WP_002235162.1; type II CRISPR RNA-guided endonuclease Cas9; Nme1Cas9 polypeptide sequence
MAAFKPNPINYILGLDIGIASVGWAMVEIDEDENPICLIDLGVRVFERAEVPKTGDSLAMARRLARSVRRLTRRRAHRLLRARRLLKREGVLQAADFDENGLIKSLPNTPWQLRAAALDRKLTPLEWSAVLLHLIKHRGYLSQRKNEGETADKELGALLKGVADNAHALQTGDFRTPAELALNKFEKESGHIRNQRGDYSHTFSRKDLQAELILLFEKQKEFGNPHVSGGLKEGIETLLMTQRPALSGDAVQKMLGHCTFEPAEPKAAKNTYTAERFIWLTKLNNLRILEQGSERPLTDTERATLMDEPYRKSKLTYAQARKLLGLEDTAFFKGLRYGKDNAEASTLMEMKAYHAISRALEKEGLKDKKSPLNLSPELQDEIGTAFSLFKTDEDITGRLKDRIQPEILEALLKHISFDKFVQISLKALRRIVPLMEQGKRYDEACAEIYGDHYGKKNTEEKIYLPPIPADEIRNPVVLRALSQARKVINGVVRRYGSPARIHIETAREVGKSFKDRKEIEKRQEENRKDREKAAAKFREYFPNFVGEPKSKDILKLRLYEQQHGKCLYSGKEINLGRLNEKGYVEIDHALPFSRTWDDSFNNKVLVLGSENQNKGNQTPYEYFNGKDNSREWQEFKARVETSRFPRSKKQRILLQKFDEDGFKERNLNDTRYVNRFLCQFVADRMRLTGKGKKRVFASNGQITNLLRGFWGLRKVRAENDRHHALDAVVVACSTVAMQQKITRFVRYKEMNAFDGKTIDKETGEVLHQKTHFPQPWEFFAQEVMIRVFGKPDGKPEFEEADTPEKLRTLLAEKLSSRPEAVHEYVTPLFVSRAPNRKMSGQGHMETVKSAKRLDEGVSVLRVPLTQLKLKDLEKMVNREREPKLYEALKARLEAHKDDPAKAFAEPFYKYDKAGNRTQQVKAVRVEQVQKTGVWVRNHNGIADNATMVRVDVFEKGDKYYLVPIYSWQVAKGILPDRAVVQGKDEEDWQLIDDSFNFKFSLHPNDLVEVITKKARMFGYFASCHRGTGNINIRIHDLDHKIGKNGILEGIGVKTALSFQKYQIDELGKEIRPCRLKKRPPVR

SEQ ID NO: 213 - protein, 1082 aa, Neisseria meningitidis
  REGION 1..1082: note = MISC_FEATURE - NCBI Reference: WP_002230835; type II CRISPR RNA-guided endonuclease Cas9; Nme2Cas9 polypeptide sequence
MAAFKPNPINYILGLDIGIASVGWAMVEIDEEENPIRLIDLGVRVFERAEVPKTGDSLAMARRLARSVRRLTRRRAHRLLRARRLLKREGVLQAADFDENGLIKSLPNTPWQLRAAALDRKLTPLEWSAVLLHLIKHRGYLSQRKNEGETADKELGALLKGVANNAHALQTGDFRTPAELALNKFEKESGHIRNQRGDYSHTFSRKDLQAELILLFEKQKEFGNPHVSGGLKEGIETLLMTQRPALSGDAVQKMLGHCTFEPAEPKAAKNTYTAERFIWLTKLNNLRILEQGSERPLTDTERATLMDEPYRKSKLTYAQARKLLGLEDTAFFKGLRYGKDNAEASTLMEMKAYHAISRALEKEGLKDKKSPLNLSSELQDEIGTAFSLFKTDEDITGRLKDRVQPEILEALLKHISFDKFVQISLKALRRIVPLMEQGKRYDEACAEIYGDHYGKKNTEEKIYLPPIPADEIRNPVVLRALSQARKVINGVVRRYGSPARIHIETAREVGKSFKDRKEIEKRQEENRKDREKAAAKFREYFPNFVGEPKSKDILKLRLYEQQHGKCLYSGKEINLVRLNEKGYVEIDHALPFSRTWDDSFNNKVLVLGSENQNKGNQTPYEYFNGKDNSREWQEFKARVETSRFPRSKKQRILLQKFDEDGFKECNLNDTRYVNRFLCQFVADHILLTGKGKRRVFASNGQITNLLRGFWGLRKVRAENDRHHALDAVVVACSTVAMQQKITRFVRYKEMNAFDGKTIDKETGKVLHQKTHFPQPWEFFAQEVMIRVFGKPDGKPEFEEADTPEKLRTLLAEKLSSRPEAVHEYVTPLFVSRAPNRKMSGAHKDTLRSAKRFVKHNEKISVKRVWLTEIKLADLENMVNYKNGREIELYEALKARLEAYGGNAKQAFDPKDNPFYKKGGQLVKAVRVEKTQESGVLLNKKNAYTIADNGDMVRVDVFCKVDKKGKNQYFIVPIYAWQVAENILPDIDCKGYRIDDSYTFCFSLHKYDLIAFQKDEKSKVEFAYYINCDSSNGRFYLAWHDKGSKEQQFRISTQNLVLIQKYQVNELGKEIRPCRLKKRPPVR

SEQ ID NO: 214 - protein, 1300 aa, Francisella tularensis
  REGION 1..1300: note = MISC_FEATURE - wild type Cpf1 polypeptide sequence
  source 1..1300: note = subspecies novicida
MSIYQEFVNKYSLSKTLRFELIPQGKTLENIKARGLILDDEKRAKDYKKAKQIIDKYHQFFIEEILSSVCISEDLLQNYSDVYFKLKKSDDDNLQKDFKSAKDTIKKQISEYIKDSEKFKNLFNQNLIDAKKGQESDLILWLKQSKDNGIELFKANSDITDIDEALEIIKSFKGWTTYFKGFHENRKNVYSSNDIPTSIIYRIVDDNLPKFLENKAKYESLKDKAPEAINYEQIKKDLAEELTFDIDYKTSEVNQRVFSLDEVFEIANFNNYLNQSGITKFNTIIGGKFVNGENTKRKGINEYINLYSQQINDKTLKKYKMSVLFKQILSDTESKSFVIDKLEDDSDVVTTMQSFYEQIAAFKTVEEKSIKETLSLLFDDLKAQKLDLSKIYFKNDKSLTDLSQQVFDDYSVIGTAVLEYITQQIAPKNLDNPSKKEQELIAKKTEKAKYLSLETIKLALEEFNKHRDIDKQCRFEEILANFAAIPMIFDEIAQNKDNLAQISIKYQNQGKKDLLQASAEDDVKAIKDLLDQTNNLLHKLKIFHISQSEDKANILDKDEHFYLVFEECYFELANIVPLYNKIRNYITQKPYSDEKFKLNFENSTLANGWDKNKEPDNTAILFIKDDKYYLGVMNKKNNKIFDDKAIKENKGEGYKKIVYKLLPGANKMLPKVFFSAKSIKFYNPSEDILRIRNHSTHTKNGSPQKGYEKFEFNIEDCRKFIDFYKQSISKHPEWKDFGFRFSDTQRYNSIDEFYREVENQGYKLTFENISESYIDSVVNQGKLYLFQIYNKDFSAYSKGRPNLHTLYWKALFDERNLQDVVYKLNGEAELFYRKQSIPKKITHPAKEAIANKNKDNPKKESVFEYDLIKDKRFTEDKFFFHCPITINFKSSGANKFNDEINLLLKEKANDVHILSIDRGERHLAYYTLVDGKGNIIKQDTFNIIGNDRMKTNYHDKLAAIEKDRDSARKDWKKINNIKEMKEGYLSQVVHEIAKLVIEYNAIVVFEDLNFGFKRGRFKVEKQVYQKLEKMLIEKLNYLVFKDNEFDKTGGVLRAYQLTAPFETFKKMGKQTGIIYYVPAGFTSKICPVTGFVNQLYPKYESVSKSQEFFSKFDKICYNLDKGYFEFSFDYKNFGDKAAKGKWTIASFGSRLINFRNSDKNHNWDTREVYPTKELEKLLKDYSIEYGHGECIKAAICGESDKKFFAKLTSVLNTILQMRNSKTGTELDYLISPVADVNGNFFDSRQAPKNMPQDADANGAYHIGLKGLMLLGRIKNNQEGKKLNLVIKNEEYFEFVQNRNN

SEQ ID NO: 215 - protein, 1300 aa, Francisella tularensis
  REGION 1..1300: note = MISC_FEATURE - Cpf1 D917A polypeptide sequence
  source 1..1300: note = subspecies novicida
MSIYQEFVNKYSLSKTLRFELIPQGKTLENIKARGLILDDEKRAKDYKKAKQIIDKYHQFFIEEILSSVCISEDLLQNYSDVYFKLKKSDDDNLQKDFKSAKDTIKKQISEYIKDSEKFKNLFNQNLIDAKKGQESDLILWLKQSKDNGIELFKANSDITDIDEALEIIKSFKGWTTYFKGFHENRKNVYSSNDIPTSIIYRIVDDNLPKFLENKAKYESLKDKAPEAINYEQIKKDLAEELTFDIDYKTSEVNQRVFSLDEVFEIANFNNYLNQSGITKFNTIIGGKFVNGENTKRKGINEYINLYSQQINDKTLKKYKMSVLFKQILSDTESKSFVIDKLEDDSDVVTTMQSFYEQIAAFKTVEEKSIKETLSLLFDDLKAQKLDLSKIYFKNDKSLTDLSQQVFDDYSVIGTAVLEYITQQIAPKNLDNPSKKEQELIAKKTEKAKYLSLETIKLALEEFNKHRDIDKQCRFEEILANFAAIPMIFDEIAQNKDNLAQISIKYQNQGKKDLLQASAEDDVKAIKDLLDQTNNLLHKLKIFHISQSEDKANILDKDEHFYLVFEECYFELANIVPLYNKIRNYITQKPYSDEKFKLNFENSTLANGWDKNKEPDNTAILFIKDDKYYLGVMNKKNNKIFDDKAIKENKGEGYKKIVYKLLPGANKMLPKVFFSAKSIKFYNPSEDILRIRNHSTHTKNGSPQKGYEKFEFNIEDCRKFIDFYKQSISKHPEWKDFGFRFSDTQRYNSIDEFYREVENQGYKLTFENISESYIDSVVNQGKLYLFQIYNKDFSAYSKGRPNLHTLYWKALFDERNLQDVVYKLNGEAELFYRKQSIPKKITHPAKEAIANKNKDNPKKESVFEYDLIKDKRFTEDKFFFHCPITINFKSSGANKFNDEINLLLKEKANDVHILSIARGERHLAYYTLVDGKGNIIKQDTFNIIGNDRMKTNYHDKLAAIEKDRDSARKDWKKINNIKEMKEGYLSQVVHEIAKLVIEYNAIVVFEDLNFGFKRGRFKVEKQVYQKLEKMLIEKLNYLVFKDNEFDKTGGVLRAYQLTAPFETFKKMGKQTGIIYYVPAGFTSKICPVTGFVNQLYPKYESVSKSQEFFSKFDKICYNLDKGYFEFSFDYKNFGDKAAKGKWTIASFGSRLINFRNSDKNHNWDTREVYPTKELEKLLKDYSIEYGHGECIKAAICGESDKKFFAKLTSVLNTILQMRNSKTGTELDYLISPVADVNGNFFDSRQAPKNMPQDADANGAYHIGLKGLMLLGRIKNNQEGKKLNLVIKNEEYFEFVQNRNN

SEQ ID NO: 216 - protein, 1300 aa, Francisella tularensis
  REGION 1..1300: note = MISC_FEATURE - Cpf1 E1006A polypeptide sequence
  source 1..1300: note = subspecies novicida
MSIYQEFVNKYSLSKTLRFELIPQGKTLENIKARGLILDDEKRAKDYKKAKQIIDKYHQFFIEEILSSVCISEDLLQNYSDVYFKLKKSDDDNLQKDFKSAKDTIKKQISEYIKDSEKFKNLFNQNLIDAKKGQESDLILWLKQSKDNGIELFKANSDITDIDEALEIIKSFKGWTTYFKGFHENRKNVYSSNDIPTSIIYRIVDDNLPKFLENKAKYESLKDKAPEAINYEQIKKDLAEELTFDIDYKTSEVNQRVFSLDEVFEIANFNNYLNQSGITKFNTIIGGKFVNGENTKRKGINEYINLYSQQINDKTLKKYKMSVLFKQILSDTESKSFVIDKLEDDSDVVTTMQSFYEQIAAFKTVEEKSIKETLSLLFDDLKAQKLDLSKIYFKNDKSLTDLSQQVFDDYSVIGTAVLEYITQQIAPKNLDNPSKKEQELIAKKTEKAKYLSLETIKLALEEFNKHRDIDKQCRFEEILANFAAIPMIFDEIAQNKDNLAQISIKYQNQGKKDLLQASAEDDVKAIKDLLDQTNNLLHKLKIFHISQSEDKANILDKDEHFYLVFEECYFELANIVPLYNKIRNYITQKPYSDEKFKLNFENSTLANGWDKNKEPDNTAILFIKDDKYYLGVMNKKNNKIFDDKAIKENKGEGYKKIVYKLLPGANKMLPKVFFSAKSIKFYNPSEDILRIRNHSTHTKNGSPQKGYEKFEFNIEDCRKFIDFYKQSISKHPEWKDFGFRFSDTQRYNSIDEFYREVENQGYKLTFENISESYIDSVVNQGKLYLFQIYNKDFSAYSKGRPNLHTLYWKALFDERNLQDVVYKLNGEAELFYRKQSIPKKITHPAKEAIANKNKDNPKKESVFEYDLIKDKRFTEDKFFFHCPITINFKSSGANKFNDEINLLLKEKANDVHILSIDRGERHLAYYTLVDGKGNIIKQDTFNIIGNDRMKTNYHDKLAAIEKDRDSARKDWKKINNIKEMKEGYLSQVVHEIAKLVIEYNAIVVFADLNFGFKRGRFKVEKQVYQKLEKMLIEKLNYLVFKDNEFDKTGGVLRAYQLTAPFETFKKMGKQTGIIYYVPAGFTSKICPVTGFVNQLYPKYESVSKSQEFFSKFDKICYNLDKGYFEFSFDYKNFGDKAAKGKWTIASFGSRLINFRNSDKNHNWDTREVYPTKELEKLLKDYSIEYGHGECIKAAICGESDKKFFAKLTSVLNTILQMRNSKTGTELDYLISPVADVNGNFFDSRQAPKNMPQDADANGAYHIGLKGLMLLGRIKNNQEGKKLNLVIKNEEYFEFVQNRNN

SEQ ID NO: 217 - protein, 1300 aa, Francisella tularensis
  REGION 1..1300: note = MISC_FEATURE - Cpf1 D1255A polypeptide sequence
  source 1..1300: note = subspecies novicida
MSIYQEFVNKYSLSKTLRFELIPQGKTLENIKARGLILDDEKRAKDYKKAKQIIDKYHQFFIEEILSSVCISEDLLQNYSDVYFKLKKSDDDNLQKDFKSAKDTIKKQISEYIKDSEKFKNLFNQNLIDAKKGQESDLILWLKQSKDNGIELFKANSDITDIDEALEIIKSFKGWTTYFKGFHENRKNVYSSNDIPTSIIYRIVDDNLPKFLENKAKYESLKDKAPEAINYEQIKKDLAEELTFDIDYKTSEVNQRVFSLDEVFEIANFNNYLNQSGITKFNTIIGGKFVNGENTKRKGINEYINLYSQQINDKTLKKYKMSVLFKQILSDTESKSFVIDKLEDDSDVVTTMQSFYEQIAAFKTVEEKSIKETLSLLFDDLKAQKLDLSKIYFKNDKSLTDLSQQVFDDYSVIGTAVLEYITQQIAPKNLDNPSKKEQELIAKKTEKAKYLSLETIKLALEEFNKHRDIDKQCRFEEILANFAAIPMIFDEIAQNKDNLAQISIKYQNQGKKDLLQASAEDDVKAIKDLLDQTNNLLHKLKIFHISQSEDKANILDKDEHFYLVFEECYFELANIVPLYNKIRNYITQKPYSDEKFKLNFENSTLANGWDKNKEPDNTAILFIKDDKYYLGVMNKKNNKIFDDKAIKENKGEGYKKIVYKLLPGANKMLPKVFFSAKSIKFYNPSEDILRIRNHSTHTKNGSPQKGYEKFEFNIEDCRKFIDFYKQSISKHPEWKDFGFRFSDTQRYNSIDEFYREVENQGYKLTFENISESYIDSVVNQGKLYLFQIYNKDFSAYSKGRPNLHTLYWKALFDERNLQDVVYKLNGEAELFYRKQSIPKKITHPAKEAIANKNKDNPKKESVFEYDLIKDKRFTEDKFFFHCPITINFKSSGANKFNDEINLLLKEKANDVHILSIDRGERHLAYYTLVDGKGNIIKQDTFNIIGNDRMKTNYHDKLAAIEKDRDSARKDWKKINNIKEMKEGYLSQVVHEIAKLVIEYNAIVVFEDLNFGFKRGRFKVEKQVYQKLEKMLIEKLNYLVFKDNEFDKTGGVLRAYQLTAPFETFKKMGKQTGIIYYVPAGFTSKICPVTGFVNQLYPKYESVSKSQEFFSKFDKICYNLDKGYFEFSFDYKNFGDKAAKGKWTIASFGSRLINFRNSDKNHNWDTREVYPTKELEKLLKDYSIEYGHGECIKAAICGESDKKFFAKLTSVLNTILQMRNSKTGTELDYLISPVADVNGNFFDSRQAPKNMPQDAAANGAYHIGLKGLMLLGRIKNNQEGKKLNLVIKNEEYFEFVQNRNN

SEQ ID NO: 218 - protein, 1300 aa, Francisella tularensis
  REGION 1..1300: note = MISC_FEATURE - Cpf1 D917A/E1006A polypeptide sequence
  source 1..1300: note = subspecies novicida
MSIYQEFVNKYSLSKTLRFELIPQGKTLENIKARGLILDDEKRAKDYKKAKQIIDKYHQFFIEEILSSVCISEDLLQNYSDVYFKLKKSDDDNLQKDFKSAKDTIKKQISEYIKDSEKFKNLFNQNLIDAKKGQESDLILWLKQSKDNGIELFKANSDITDIDEALEIIKSFKGWTTYFKGFHENRKNVYSSNDIPTSIIYRIVDDNLPKFLENKAKYESLKDKAPEAINYEQIKKDLAEELTFDIDYKTSEVNQRVFSLDEVFEIANFNNYLNQSGITKFNTIIGGKFVNGENTKRKGINEYINLYSQQINDKTLKKYKMSVLFKQILSDTESKSFVIDKLEDDSDVVTTMQSFYEQIAAFKTVEEKSIKETLSLLFDDLKAQKLDLSKIYFKNDKSLTDLSQQVFDDYSVIGTAVLEYITQQIAPKNLDNPSKKEQELIAKKTEKAKYLSLETIKLALEEFNKHRDIDKQCRFEEILANFAAIPMIFDEIAQNKDNLAQISIKYQNQGKKDLLQASAEDDVKAIKDLLDQTNNLLHKLKIFHISQSEDKANILDKDEHFYLVFEECYFELANIVPLYNKIRNYITQKPYSDEKFKLNFENSTLANGWDKNKEPDNTAILFIKDDKYYLGVMNKKNNKIFDDKAIKENKGEGYKKIVYKLLPGANKMLPKVFFSAKSIKFYNPSEDILRIRNHSTHTKNGSPQKGYEKFEFNIEDCRKFIDFYKQSISKHPEWKDFGFRFSDTQRYNSIDEFYREVENQGYKLTFENISESYIDSVVNQGKLYLFQIYNKDFSAYSKGRPNLHTLYWKALFDERNLQDVVYKLNGEAELFYRKQSIPKKITHPAKEAIANKNKDNPKKESVFEYDLIKDKRFTEDKFFFHCPITINFKSSGANKFNDEINLLLKEKANDVHILSIARGERHLAYYTLVDGKGNIIKQDTFNIIGNDRMKTNYHDKLAAIEKDRDSARKDWKKINNIKEMKEGYLSQVVHEIAKLVIEYNAIVVFADLNFGFKRGRFKVEKQVYQKLEKMLIEKLNYLVFKDNEFDKTGGVLRAYQLTAPFETFKKMGKQTGIIYYVPAGFTSKICPVTGFVNQLYPKYESVSKSQEFFSKFDKICYNLDKGYFEFSFDYKNFGDKAAKGKWTIASFGSRLINFRNSDKNHNWDTREVYPTKELEKLLKDYSIEYGHGECIKAAICGESDKKFFAKLTSVLNTILQMRNSKTGTELDYLISPVADVNGNFFDSRQAPKNMPQDADANGAYHIGLKGLMLLGRIKNNQEGKKLNLVIKNEEYFEFVQNRNN

SEQ ID NO: 219 - protein, 1300 aa, Francisella tularensis
  REGION 1..1300: note = MISC_FEATURE - Cpf1 D917A/D1255A polypeptide sequence
  source 1..1300: note = subspecies novicida
MSIYQEFVNKYSLSKTLRFELIPQGKTLENIKARGLILDDEKRAKDYKKAKQIIDKYHQFFIEEILSSVCISEDLLQNYSDVYFKLKKSDDDNLQKDFKSAKDTIKKQISEYIKDSEKFKNLFNQNLIDAKKGQESDLILWLKQSKDNGIELFKANSDITDIDEALEIIKSFKGWTTYFKGFHENRKNVYSSNDIPTSIIYRIVDDNLPKFLENKAKYESLKDKAPEAINYEQIKKDLAEELTFDIDYKTSEVNQRVFSLDEVFEIANFNNYLNQSGITKFNTIIGGKFVNGENTKRKGINEYINLYSQQINDKTLKKYKMSVLFKQILSDTESKSFVIDKLEDDSDVVTTMQSFYEQIAAFKTVEEKSIKETLSLLFDDLKAQKLDLSKIYFKNDKSLTDLSQQVFDDYSVIGTAVLEYITQQIAPKNLDNPSKKEQELIAKKTEKAKYLSLETIKLALEEFNKHRDIDKQCRFEEILANFAAIPMIFDEIAQNKDNLAQISIKYQNQGKKDLLQASAEDDVKAIKDLLDQTNNLLHKLKIFHISQSEDKANILDKDEHFYLVFEECYFELANIVPLYNKIRNYITQKPYSDEKFKLNFENSTLANGWDKNKEPDNTAILFIKDDKYYLGVMNKKNNKIFDDKAIKENKGEGYKKIVYKLLPGANKMLPKVFFSAKSIKFYNPSEDILRIRNHSTHTKNGSPQKGYEKFEFNIEDCRKFIDFYKQSISKHPEWKDFGFRFSDTQRYNSIDEFYREVENQGYKLTFENISESYIDSVVNQGKLYLFQIYNKDFSAYSKGRPNLHTLYWKALFDERNLQDVVYKLNGEAELFYRKQSIPKKITHPAKEAIANKNKDNPKKESVFEYDLIKDKRFTEDKFFFHCPITINFKSSGANKFNDEINLLLKEKANDVHILSIARGERHLAYYTLVDGKGNIIKQDTFNIIGNDRMKTNYHDKLAAIEKDRDSARKDWKKINNIKEMKEGYLSQVVHEIAKLVIEYNAIVVFEDLNFGFKRGRFKVEKQVYQKLEKMLIEKLNYLVFKDNEFDKTGGVLRAYQLTAPFETFKKMGKQTGIIYYVPAGFTSKICPVTGFVNQLYPKYESVSKSQEFFSKFDKICYNLDKGYFEFSFDYKNFGDKAAKGKWTIASFGSRLINFRNSDKNHNWDTREVYPTKELEKLLKDYSIEYGHGECIKAAICGESDKKFFAKLTSVLNTILQMRNSKTGTELDYLISPVADVNGNFFDSRQAPKNMPQDAAANGAYHIGLKGLMLLGRIKNNQEGKKLNLVIKNEEYFEFVQNRNN

SEQ ID NO: 220 - protein, 1300 aa, Francisella tularensis
  REGION 1..1300: note = MISC_FEATURE - Cpf1 E1006A/D1255A polypeptide sequence
  source 1..1300: note = subspecies novicida
MSIYQEFVNKYSLSKTLRFELIPQGKTLENIKARGLILDDEKRAKDYKKAKQIIDKYHQFFIEEILSSVCISEDLLQNYSDVYFKLKKSDDDNLQKDFKSAKDTIKKQISEYIKDSEKFKNLFNQNLIDAKKGQESDLILWLKQSKDNGIELFKANSDITDIDEALEIIKSFKGWTTYFKGFHENRKNVYSSNDIPTSIIYRIVDDNLPKFLENKAKYESLKDKAPEAINYEQIKKDLAEELTFDIDYKTSEVNQRVFSLDEVFEIANFNNYLNQSGITKFNTIIGGKFVNGENTKRKGINEYINLYSQQINDKTLKKYKMSVLFKQILSDTESKSFVIDKLEDDSDVVTTMQSFYEQIAAFKTVEEKSIKETLSLLFDDLKAQKLDLSKIYFKNDKSLTDLSQQVFDDYSVIGTAVLEYITQQIAPKNLDNPSKKEQELIAKKTEKAKYLSLETIKLALEEFNKHRDIDKQCRFEEILANFAAIPMIFDEIAQNKDNLAQISIKYQNQGKKDLLQASAEDDVKAIKDLLDQTNNLLHKLKIFHISQSEDKANILDKDEHFYLVFEECYFELANIVPLYNKIRNYITQKPYSDEKFKLNFENSTLANGWDKNKEPDNTAILFIKDDKYYLGVMNKKNNKIFDDKAIKENKGEGYKKIVYKLLPGANKMLPKVFFSAKSIKFYNPSEDILRIRNHSTHTKNGSPQKGYEKFEFNIEDCRKFIDFYKQSISKHPEWKDFGFRFSDTQRYNSIDEFYREVENQGYKLTFENISESYIDSVVNQGKLYLFQIYNKDFSAYSKGRPNLHTLYWKALFDERNLQDVVYKLNGEAELFYRKQSIPKKITHPAKEAIANKNKDNPKKESVFEYDLIKDKRFTEDKFFFHCPITINFKSSGANKFNDEINLLLKEKANDVHILSIDRGERHLAYYTLVDGKGNIIKQDTFNIIGNDRMKTNYHDKLAAIEKDRDSARKDWKKINNIKEMKEGYLSQVVHEIAKLVIEYNAIVVFADLNFGFKRGRFKVEKQVYQKLEKMLIEKLNYLVFKDNEFDKTGGVLRAYQLTAPFETFKKMGKQTGIIYYVPAGFTSKICPVTGFVNQLYPKYESVSKSQEFFSKFDKICYNLDKGYFEFSFDYKNFGDKAAKGKWTIASFGSRLINFRNSDKNHNWDTREVYPTKELEKLLKDYSIEYGHGECIKAAICGESDKKFFAKLTSVLNTILQMRNSKTGTELDYLISPVADVNGNFFDSRQAPKNMPQDAAANGAYHIGLKGLMLLGRIKNNQEGKKLNLVIKNEEYFEFVQNRNN

SEQ ID NO: 221 - protein, 1300 aa, Francisella tularensis
  REGION 1..1300: note = MISC_FEATURE - Cpf1 D917A/E1006A/D1255A polypeptide sequence
  source 1..1300: note = subspecies novicida
MSIYQEFVNKYSLSKTLRFELIPQGKTLENIKARGLILDDEKRAKDYKKAKQIIDKYHQFFIEEILSSVCISEDLLQNYSDVYFKLKKSDDDNLQKDFKSAKDTIKKQISEYIKDSEKFKNLFNQNLIDAKKGQESDLILWLKQSKDNGIELFKANSDITDIDEALEIIKSFKGWTTYFKGFHENRKNVYSSNDIPTSIIYRIVDDNLPKFLENKAKYESLKDKAPEAINYEQIKKDLAEELTFDIDYKTSEVNQRVFSLDEVFEIANFNNYLNQSGITKFNTIIGGKFVNGENTKRKGINEYINLYSQQINDKTLKKYKMSVLFKQILSDTESKSFVIDKLEDDSDVVTTMQSFYEQIAAFKTVEEKSIKETLSLLFDDLKAQKLDLSKIYFKNDKSLTDLSQQVFDDYSVIGTAVLEYITQQIAPKNLDNPSKKEQELIAKKTEKAKYLSLETIKLALEEFNKHRDIDKQCRFEEILANFAAIPMIFDEIAQNKDNLAQISIKYQNQGKKDLLQASAEDDVKAIKDLLDQTNNLLHKLKIFHISQSEDKANILDKDEHFYLVFEECYFELANIVPLYNKIRNYITQKPYSDEKFKLNFENSTLANGWDKNKEPDNTAILFIKDDKYYLGVMNKKNNKIFDDKAIKENKGEGYKKIVYKLLPGANKMLPKVFFSAKSIKFYNPSEDILRIRNHSTHTKNGSPQKGYEKFEFNIEDCRKFIDFYKQSISKHPEWKDFGFRFSDTQRYNSIDEFYREVENQGYKLTFENISESYIDSVVNQGKLYLFQIYNKDFSAYSKGRPNLHTLYWKALFDERNLQDVVYKLNGEAELFYRKQSIPKKITHPAKEAIANKNKDNPKKESVFEYDLIKDKRFTEDKFFFHCPITINFKSSGANKFNDEINLLLKEKANDVHILSIARGERHLAYYTLVDGKGNIIKQDTFNIIGNDRMKTNYHDKLAAIEKDRDSARKDWKKINNIKEMKEGYLSQVVHEIAKLVIEYNAIVVFADLNFGFKRGRFKVEKQVYQKLEKMLIEKLNYLVFKDNEFDKTGGVLRAYQLTAPFETFKKMGKQTGIIYYVPAGFTSKICPVTGFVNQLYPKYESVSKSQEFFSKFDKICYNLDKGYFEFSFDYKNFGDKAAKGKWTIASFGSRLINFRNSDKNHNWDTREVYPTKELEKLLKDYSIEYGHGECIKAAICGESDKKFFAKLTSVLNTILQMRNSKTGTELDYLISPVADVNGNFFDSRQAPKNMPQDAAANGAYHIGLKGLMLLGRIKNNQEGKKLNLVIKNEEYFEFVQNRNN

SEQ ID NO: 222 - protein, 1052 aa, Staphylococcus aureus
  REGION 1..1052: note = MISC_FEATURE - Exemplary SaCas9 polypeptide sequence
KRNYILGLDIGITSVGYGIIDYETRDVIDAGVRLFKEANVENNEGRRSKRGARRLKRRRRHRIQRVKKLLFDYNLLTDHSELSGINPYEARVKGLSQKLSEEEFSAALLHLAKRRGVHNVNEVEEDTGNELSTKEQISRNSKALEEKYVAELQLERLKKDGEVRGSINRFKTSDYVKEAKQLLKVQKAYHQLDQSFIDTYIDLLETRRTYYEGPGEGSPFGWKDIKEWYEMLMGHCTYFPEELRSVKYAYNADLYNALNDLNNLVITRDENEKLEYYEKFQIIENVFKQKKKPTLKQIAKEILVNEEDIKGYRVTSTGKPEFTNLKVYHDIKDITARKEIIENAELLDQIAKILTIYQSSEDIQEELTNLNSELTQEEIEQISNLKGYTGTHNLSLKAINLILDELWHTNDNQIAIFNRLKLVPKKVDLSQQKEIPTTLVDDFILSPVVKRSFIQSIKVINAIIKKYGLPNDIIIELAREKNSKDAQKMINEMQKRNRQTNERIEEIIRTTGKENAKYLIEKIKLHDMQEGKCLYSLEAIPLEDLLNNPFNYEVDHIIPRSVSFDNSFNNKVLVKQEENSKKGNRTPFQYLSSSDSKISYETFKKHILNLAKGKGRISKTKKEYLLEERDINRFSVQKDFINRNLVDTRYATRGLMNLLRSYFRVNNLDVKVKSINGGFTSFLRRKWKFKKERNKGYKHHAEDALIIANADFIFKEWKKLDKAKKVMENQMFEEKQAESMPEIETEQEYKEIFITPHQIKHIKDFKDYKYSHRVDKKPNRELINDTLYSTRKDDKGNTLIVNNLNGLYDKDNDKLKKLINKSPEKLLMYHHDPQTYQKLKLIMEQYGDEKNPLYKYYEETGNYLTKYSKKDNGPVIKKIKYYGNKLNAHLDITDDYPNSRNKVVKLSLKPYRFDVYLDNGVYKFVTVKNLDVIKKENYYEVNSKCYEEAKKLKKISNQAEFIASFYNNDLIKINGELYRVIGVNNDLLNRIEVNMIDITYREYLENMNDKRPPRIIKTIASKTQSIKKYSTDILGNLYEVKSKKHPQIIKKG

SEQ ID NO: 223 - protein, 1052 aa, Staphylococcus aureus
  REGION 1..1052: note = MISC_FEATURE - SaCas9n polypeptide sequence
KRNYILGLDIGITSVGYGIIDYETRDVIDAGVRLFKEANVENNEGRRSKRGARRLKRRRRHRIQRVKKLLFDYNLLTDHSELSGINPYEARVKGLSQKLSEEEFSAALLHLAKRRGVHNVNEVEEDTGNELSTKEQISRNSKALEEKYVAELQLERLKKDGEVRGSINRFKTSDYVKEAKQLLKVQKAYHQLDQSFIDTYIDLLETRRTYYEGPGEGSPFGWKDIKEWYEMLMGHCTYFPEELRSVKYAYNADLYNALNDLNNLVITRDENEKLEYYEKFQIIENVFKQKKKPTLKQIAKEILVNEEDIKGYRVTSTGKPEFTNLKVYHDIKDITARKEIIENAELLDQIAKILTIYQSSEDIQEELTNLNSELTQEEIEQISNLKGYTGTHNLSLKAINLILDELWHTNDNQIAIFNRLKLVPKKVDLSQQKEIPTTLVDDFILSPVVKRSFIQSIKVINAIIKKYGLPNDIIIELAREKNSKDAQKMINEMQKRNRQTNERIEEIIRTTGKENAKYLIEKIKLHDMQEGKCLYSLEAIPLEDLLNNPFNYEVDHIIPRSVSFDNSFNNKVLVKQEEASKKGNRTPFQYLSSSDSKISYETFKKHILNLAKGKGRISKTKKEYLLEERDINRFSVQKDFINRNLVDTRYATRGLMNLLRSYFRVNNLDVKVKSINGGFTSFLRRKWKFKKERNKGYKHHAEDALIIANADFIFKEWKKLDKAKKVMENQMFEEKQAESMPEIETEQEYKEIFITPHQIKHIKDFKDYKYSHRVDKKPNRELINDTLYSTRKDDKGNTLIVNNLNGLYDKDNDKLKKLINKSPEKLLMYHHDPQTYQKLKLIMEQYGDEKNPLYKYYEETGNYLTKYSKKDNGPVIKKIKYYGNKLNAHLDITDDYPNSRNKVVKLSLKPYRFDVYLDNGVYKFVTVKNLDVIKKENYYEVNSKCYEEAKKLKKISNQAEFIASFYNNDLIKINGELYRVIGVNNDLLNRIEVNMIDITYREYLENMNDKRPPRIIKTIASKTQSIKKYSTDILGNLYEVKSKKHPQIIKKG

SEQ ID NO: 224 - protein, 1052 aa, Staphylococcus aureus
  REGION 1..1052: note = MISC_FEATURE - SaKKH Cas9 polypeptide sequence
KRNYILGLDIGITSVGYGIIDYETRDVIDAGVRLFKEANVENNEGRRSKRGARRLKRRRRHRIQRVKKLLFDYNLLTDHSELSGINPYEARVKGLSQKLSEEEFSAALLHLAKRRGVHNVNEVEEDTGNELSTKEQISRNSKALEEKYVAELQLERLKKDGEVRGSINRFKTSDYVKEAKQLLKVQKAYHQLDQSFIDTYIDLLETRRTYYEGPGEGSPFGWKDIKEWYEMLMGHCTYFPEELRSVKYAYNADLYNALNDLNNLVITRDENEKLEYYEKFQIIENVFKQKKKPTLKQIAKEILVNEEDIKGYRVTSTGKPEFTNLKVYHDIKDITARKEIIENAELLDQIAKILTIYQSSEDIQEELTNLNSELTQEEIEQISNLKGYTGTHNLSLKAINLILDELWHTNDNQIAIFNRLKLVPKKVDLSQQKEIPTTLVDDFILSPVVKRSFIQSIKVINAIIKKYGLPNDIIIELAREKNSKDAQKMINEMQKRNRQTNERIEEIIRTTGKENAKYLIEKIKLHDMQEGKCLYSLEAIPLEDLLNNPFNYEVDHIIPRSVSFDNSFNNKVLVKQEEASKKGNRTPFQYLSSSDSKISYETFKKHILNLAKGKGRISKTKKEYLLEERDINRFSVQKDFINRNLVDTRYATRGLMNLLRSYFRVNNLDVKVKSINGGFTSFLRRKWKFKKERNKGYKHHAEDALIIANADFIFKEWKKLDKAKKVMENQMFEEKQAESMPEIETEQEYKEIFITPHQIKHIKDFKDYKYSHRVDKKPNRKLINDTLYSTRKDDKGNTLIVNNLNGLYDKDNDKLKKLINKSPEKLLMYHHDPQTYQKLKLIMEQYGDEKNPLYKYYEETGNYLTKYSKKDNGPVIKKIKYYGNKLNAHLDITDDYPNSRNKVVKLSLKPYRFDVYLDNGVYKFVTVKNLDVIKKENYYEVNSKCYEEAKKLKKISNQAEFIASFYKNDLIKINGELYRVIGVNNDLLNRIEVNMIDITYREYLENMNDKRPPHIIKTIASKTQSIKKYSTDILGNLYEVKSKKHPQIIKKG

SEQ ID NO: 225 - protein, 707 aa, synthetic construct
  REGION 1..707: note = Description of artificial sequence: Casphi-1 polypeptide sequence
MADTPTLFTQFLRHHLPGQRFRKDILKQAGRILANKGEDATIAFLRGKSEESPPDFQPPVKCPIIACSRPLTEWPIYQASVAIQGYVYGQSLAEFEASDPGCSKDGLLGWFDKTGVCTDYFSVQGLNLIFQNARKRYIGVQTKVTNRNEKRHKKLKRINAKRIAEGLPELTSDEPESALDETGHLIDPPGLNTNIYCYQQVSPKPLALSEVNQLPTAYAGYSTSGDDPIQPMVTKDRLSISKGQPGYIPEHQRALLSQKKHRRMRGYGLKARALLVIVRIQDDWAVIDLRSLLRNAYWRRIVQTKEPSTITKLLKLVTGDPVLDATRMVATFTYKPGIVQVRSAKCLKNKQGSKLFSERYLNETVSVTSIDLGSNNLVAVATYRLVNGNTPELLQRFTLPSHLVKDFERYKQAHDTLEDSIQKTAVASLPQGQQTEIRMWSMYGFREAQERVCQELGLADGSIPWNVMTATSTILTDLFLARGGDPKKCMFTSEPKKKKNSKQVLYKIRDRAWAKMYRTLLSKETREAWNKALWGLKRGSPDYARLSKRKEELARRCVNYTISTAEKRAQCGRTIVALEDLNIGFFHGRGKQEPGWVGLFTRKKENRWLMQALHKAFLELAHHRGYHVIEVNPAYTSQTCPVCRHCDPDNRDQHNREAFHCIGCGFRGNADLDVATHNIAMVAITGESLKRARGSVASKTPQPLAAE

SEQ ID NO: 226 - protein, 757 aa, synthetic construct
  REGION 1..757: note = Description of artificial sequence: Casphi-2 polypeptide sequence
MPKPAVESEFSKVLKKHFPGERFRSSYMKRGGKILAAQGEEAVVAYLQGKSEEEPPNFQPPAKCHVVTKSRDFAEWPIMKASEAIQRYIYALSTTERAACKPGKSSESHAAWFAATGVSNHGYSHVQGLNLIFDHTLGRYDGVLKKVQLRNEKARARLESINASRADEGLPEIKAEEEEVATNETGHLLQPPGINPSFYVYQTISPQAYRPRDEIVLPPEYAGYVRDPNAPIPLGVVRNRCDIQKGCPGYIPEWQREAGTAISPKTGKAVTVPGLSPKKNKRMRRYWRSEKEKAQDALLVTVRIGTDWVVIDVRGLLRNARWRTIAPKDISLNALLDLFTGDPVIDVRRNIVTFTYTLDACGTYARKWTLKGKQTKATLDKLTATQTVALVAIDLGQTNPISAGISRVTQENGALQCEPLDRFTLPDDLLKDISAYRIAWDRNEEELRARSVEALPEAQQAEVRALDGVSKETARTQLCADFGLDPKRLPWDKMSSNTTFISEALLSNSVSRDQVFFTPAPKKGAKKKAPVEVMRKDRTWARAYKPRLSVEAQKLKNEALWALKRTSPEYLKLSRRKEELCRRSINYVIEKTRRRTQCQIVIPVIEDLNVRFFHGSGKRLPGWDNFFTAKKENRWFIQGLHKAFSDLRTHRSFYVFEVRPERTSITCPKCGHCEVGNRDGEAFQCLSCGKTCNADLDVATHNLTQVALTGKTMPKREEPRDAQGTAPARKTKKASKSKAPPAEREDQTPAQEPSQTS

SEQ ID NO: 227 - protein, 766 aa, synthetic construct
  REGION 1..766: note = Description of artificial sequence: Casphi-3 polypeptide sequence
MEKEITELTKIRREFPNKKFSSTDMKKAGKLLKAEGPDAVRDFLNSCQEIIGDFKPPVKTNIVSISRPFEEWPVSMVGRAIQEYYFSLTKEELESVHPGTSSEDHKSFFNITGLSNYNYTSVQGLNLIFKNAKAIYDGTLVKANNKNKKLEKKFNEINHKRSLEGLPIITPDFEEPFDENGHLNNPPGINRNIYGYQGCAAKVFVPSKHKMVSLPKEYEGYNRDPNLSLAGFRNRLEIPEGEPGHVPWFQRMDIPEGQIGHVNKIQRFNFVHGKNSGKVKFSDKTGRVKRYHHSKYKDATKPYKFLEESKKVSALDSILAIITIGDDWVVFDIRGLYRNVFYRELAQKGLTAVQLLDLFTGDPVIDPKKGVVTFSYKEGVVPVFSQKIVPRFKSRDTLEKLTSQGPVALLSVDLGQNEPVAARVCSLKNINDKITLDNSCRISFLDDYKKQIKDYRDSLDELEIKIRLEAINSLETNQQVEIRDLDVFSADRAKANTVDMFDIDPNLISWDSMSDARVSTQISDLYLKNGGDESRVYFEINNKRIKRSDYNISQLVRPKLSDSTRKNLNDSIWKLKRTSEEYLKLSKRKLELSRAVVNYTIRQSKLLSGINDIVIILEDLDVKKKFNGRGIRDIGWDNFFSSRKENRWFIPAFHKAFSELSSNRGLCVIEVNPAWTSATCPDCGFCSKENRDGINFTCRKCGVSYHADIDVATLNIARVAVLGKPMSGPADRERLGDTKKPRVARSRKTMKRKDISNSTVEAMVTA

SEQ ID NO: 228 - protein, 765 aa, synthetic construct
  REGION 1..765: note = Description of artificial sequence: Casphi-4 polypeptide sequence
MYSLEMADLKSEPSLLAKLLRDRFPGKYWLPKYWKLAEKKRLTGGEEAACEYMADKQLDSPPPNFRPPARCVILAKSRPFEDWPVHRVASKAQSFVIGLSEQGFAALRAAPPSTADARRDWLRSHGASEDDLMALEAQLLETIMGNAISLHGGVLKKIDNANVKAAKRLSGRNEARLNKGLQELPPEQEGSAYGADGLLVNPPGLNLNIYCRKSCCPKPVKNTARFVGHYPGYLRDSDSILISGTMDRLTIIEGMPGHIPAWQREQGLVKPGGRRRRLSGSESNMRQKVDPSTGPRRSTRSGTVNRSNQRTGRNGDPLLVEIRMKEDWVLLDARGLLRNLRWRESKRGLSCDHEDLSLSGLLALFSGDPVIDPVRNEVVFLYGEGIIPVRSTKPVGTRQSKKLLERQASMGPLTLISCDLGQTNLIAGRASAISLTHGSLGVRSSVRIELDPEIIKSFERLRKDADRLETEILTAAKETLSDEQRGEVNSHEKDSPQTAKASLCRELGLHPPSLPWGQMGPSTTFIADMLISHGRDDDAFLSHGEFPTLEKRKKFDKRFCLESRPLLSSETRKALNESLWEVKRTSSEYARLSQRKKEMARRAVNFVVEISRRKTGLSNVIVNIEDLNVRIFHGGGKQAPGWDGFFRPKSENRWFIQAIHKAFSDLAAHHGIPVIESDPQRTSMTCPECGHCDSKNRNGVRFLCKGCGASMDADFDAACRNLERVALTGKPMPKPSTSCERLLSATTGKVCSDHSLSHDAIEKAS

SEQ ID NO: 229 - protein, 793 aa, synthetic construct
  REGION 1..793: note = Description of artificial sequence: Casphi-5 polypeptide sequence
MSSLPTPLELLKQKHADLFKGLQFSSKDNKMAGKVLKKDGEEAALAFLSERGVSRGELPNFRPPAKTLVVAQSRPFEEFPIYRVSEAIQLYVYSLSVKELETVPSGSSTKKEHQRFFQDSSVPDFGYTSVQGLNKIFGLARGIYLGVITRGENQLQKAKSKHEALNKKRRASGEAETEFDPTPYEYMTPERKLAKPPGVNHSIMCYVDISVDEFDFRNPDGIVLPSEYAGYCREINTAIEKGTVDRLGHLKGGPGYIPGHQRKESTTEGPKINFRKGRIRRSYTALYAKRDSRRVRQGKLALPSYRHHMMRLNSNAESAILAVIFFGKDWVVFDLRGLLRNVRWRNLFVDGSTPSTLLGMFGDPVIDPKRGVVAFCYKEQIVPVVSKSITKMVKAPELLNKLYLKSEDPLVLVAIDLGQTNPVGVGVYRVMNASLDYEVVTRFALESELLREIESYRQRTNAFEAQIRAETFDAMTSEEQEEITRVRAFSASKAKENVCHRFGMPVDAVDWATMGSNTIHIAKWVMRHGDPSLVEVLEYRKDNEIKLDKNGVPKKVKLTDKRIANLTSIRLRFSQETSKHYNDTMWELRRKHPVYQKLSKSKADFSRRVVNSIIRRVNHLVPRARIVFIIEDLKNLGKVFHGSGKRELGWDSYFEPKSENRWFIQVLHKAFSETGKHKGYYIIECWPNWTSCTCPKCSCCDSENRHGEVFRCLACGYTCNTDFGTAPDNLVKIATTGKGLPGPKKRCKGSSKGKNPKIARSSETGVSVTESGAPKVKKSSPTQTSQSSSQSAP

SEQ ID NO: 230 - protein, 441 aa, synthetic construct
  REGION 1..441: note = Description of artificial sequence: Casphi-6 polypeptide sequence
MNKIEKEKTPLAKLMNENFAGLRFPFAIIKQAGKKLLKEGELKTIEYMTGKGSIEPLPNFKPPVKCLIVAKRRDLKYFPICKASCEIQSYVYSLNYKDFMDYFSTPMTSQKQHEEFFKKSGLNIEYQNVAGLNLIFNNVKNTYNGVILKVKNRNEKLKKKAIKNNYEFEEIKTFNDDGCLINKPGINNVIYCFQSISPKILKNITHLPKEYNDYDCSVDRNIIQKYVSRLDIPESQPGHVPEWQRKLPEFNNTNNPRRRRKWYSNGRNISKGYSVDQVNQAKIEDSLLAQIKIGEDWIILDIRGLLRDLNRRELISYKNKLTIKDVLGFFSDYPIIDIKKNLVTFCYKEGVIQVVSQKSIGNKKSKQLLEKLIENKPIALVSIDLGQTNPVSVKISKLNKINNKISIESFTYRFLNEEILKEIEKYRKDYDKLELKLINEA

SEQ ID NO: 231 - protein, 772 aa, synthetic construct
  REGION 1..772: note = Description of artificial sequence: Casphi-7 polypeptide sequence
MSNTAVSTREHMSNKTTPPSPLSLLLRAHFPGLKFESQDYKIAGKKLRDGGPEAVISYLTGKGQAKLKDVKPPAKAFVIAQSRPFIEWDLVRVSRQIQEKIFGIPATKGRPKQDGLSETAFNEAVASLEVDGKSKLNEETRAAFYEVLGLDAPSLHAQAQNALIKSAISIREGVLKKVENRNEKNLSKTKRRKEAGEEATFVEEKAHDERGYLIHPPGVNQTIPGYQAVVIKSCPSDFIGLPSGCLAKESAEALTDYLPHDRMTIPKGQPGYVPEWQHPLLNRRKNRRRRDWYSASLNKPKATCSKRSGTPNRKNSRTDQIQSGRFKGAIPVLMRFQDEWVIIDIRGLLRNARYRKLLKEKSTIPDLLSLFTGDPSIDMRQGVCTFIYKAGQACSAKMVKTKNAPEILSELTKSGPVVLVSIDLGQTNPIAAKVSRVTQLSDGQLSHETLLRELLSNDSSDGKEIARYRVASDRLRDKLANLAVERLSPEHKSEILRAKNDTPALCKARVCAALGLNPEMIAWDKMTPYTEFLATAYLEKGGDRKVATLKPKNRPEMLRRDIKFKGTEGVRIEVSPEAAEAYREAQWDLQRTSPEYLRLSTWKQELTKRILNQLRHKAAKSSQCEVVVMAFEDLNIKMMHGNGKWADGGWDAFFIKKRENRWFMQAFHKSLTELGAHKGVPTIEVTPHRTSITCTKCGHCDKANRDGERFACQKCGFVAHADLEIATDNIERVALTGKPMPKPESERSGDAKKSVGARKAAFKPEEDAEAAE

SEQ ID NO: 232 - protein, 717 aa, synthetic construct
  REGION 1..717: note = Description of artificial sequence: Casphi-8 polypeptide sequence
MIKPTVSQFLTPGFKLIRNHSRTAGLKLKNEGEEACKKFVRENEIPKDECPNFQGGPAIANIIAKSREFTEWEIYQSSLAIQEVIFTLPKDKLPEPILKEEWRAQWLSEHGLDTVPYKEAAGLNLIIKNAVNTYKGVQVKVDNKNKNNLAKINRKNEIAKLNGEQEISFEEIKAFDDKGYLLQKPSPNKSIYCYQSVSPKPFITSKYHNVNLPEEYIGYYRKSNEPIVSPYQFDRLRIPIGEPGYVPKWQYTFLSKKENKRRKLSKRIKNVSPILGIICIKKDWCVFDMRGLLRTNHWKKYHKPTDSINDLFDYFTGDPVIDTKANVVRFRYKMENGIVNYKPVREKKGKELLENICDQNGSCKLATVDVGQNNPVAIGLFELKKVNGELTKTLISRHPTPIDFCNKITAYRERYDKLESSIKLDAIKQLTSEQKIEVDNYNNNFTPQNTKQIVCSKLNINPNDLPWDKMISGTHFISEKAQVSNKSEIYFTSTDKGKTKDVMKSDYKWFQDYKPKLSKEVRDALSDIEWRLRRESLEFNKLSKSREQDARQLANWISSMCDVIGIENLVKKNNFFGGSGKREPGWDNFYKPKKENRWWINAIHKALTELSQNKGKRVILLPAMRTSITCPKCKYCDSKNRNGEKFNCLKCGIELNADIDVATENLATVAITAQSMPKPTCERSGDAKKPVRARKAKAPEFHDKLAPSYTVVLREAV

SEQ ID NO: 233 - protein, 793 aa, synthetic construct
  REGION 1..793: note = Description of artificial sequence: Casphi-9 polypeptide sequence
MRSSREIGDKILMRQPAEKTAFQVFRQEVIGTQKLSGGDAKTAGRLYKQGKMEAAREWLLKGARDDVPPNFQPPAKCLVVAVSHPFEEWDISKTNHDVQAYIYAQPLQAEGHLNGLSEKWEDTSADQHKLWFEKTGVPDRGLPVQAINKIAKAAVNRAFGVVRKVENRNEKRRSRDNRIAEHNRENGLTEVVREAPEVATNADGFLLHPPGIDPSILSYASVSPVPYNSSKHSFVRLPEEYQAYNVEPDAPIPQFVVEDRFAIPPGQPGYVPEWQRLKCSTNKHRRMRQWSNQDYKPKAGRRAKPLEFQAHLTRERAKGALLVVMRIKEDWVVFDVRGLLRNVEWRKVLSEEAREKLTLKGLLDLFTGDPVIDTKRGIVTFLYKAEITKILSKRTVKTKNARDLLLRLTEPGEDGLRREVGLVAVDLGQTHPIAAAIYRIGRTSAGALESTVLHRQGLREDQKEKLKEYRKRHTALDSRLRKEAFETLSVEQQKEIVTVSGSGAQITKDKVCNYLGVDPSTLPWEKMGSYTHFISDDFLRRGGDPNIVHFDRQPKKGKVSKKSQRIKRSDSQWVGRMRPRLSQETAKARMEADWAAQNENEEYKRLARSKQELARWCVNTLLQNTRCITQCDEIVVVIEDLNVKSLHGKGAREPGWDNFFTPKTENRWFIQILHKTFSELPKHRGEHVIEGCPLRTSITCPACSYCDKNSRNGEKFVCVACGATFHADFEVATYNLVRLATTGMPMPKSLERQGGGEKAGGARKARKKAKQVEKIVVQANANVTMNGASLHSP

SEQ ID NO: 234 - protein, 812 aa, synthetic construct
  REGION 1..812: note = Description of artificial sequence: Casphi-10 polypeptide sequence
MDMLDTETNYATETPAQQQDYSPKPPKKAQRAPKGFSKKARPEKKPPKPITLFTQKHFSGVRFLKRVIRDASKILKLSESRTITFLEQAIERDGSAPPDVTPPVHNTIMAVTRPFEEWPEVILSKALQKHCYALTKKIKIKTWPKKGPGKKCLAAWSARTKIPLIPGQVQATNGLFDRIGSIYDGVEKKVTNRNANKKLEYDEAIKEGRNPAVPEYETAYNIDGTLINKPGYNPNLYITQSRTPRLITEADRPLVEKILWQMVEKKTQSRNQARRARLEKAAHLQGLPVPKFVPEKVDRSQKIEIRIIDPLDKIEPYMPQDRMAIKASQDGHVPYWQRPFLSKRRNRRVRAGWGKQVSSIQAWLTGALLVIVRLGNEAFLADIRGALRNAQWRKLLKPDATYQSLFNLFTGDPVVNTRTNHLTMAYREGVVNIVKSRSFKGRQTREHLLTLLGQGKTVAGVSFDLGQKHAAGLLAAHFGLGEDGNPVFTPIQACFLPQRYLDSLTNYRNRYDALTLDMRRQSLLALTPAQQQEFADAQRDPGGQAKRACCLKLNLNPDEIRWDLVSGISTMISDLYIERGGDPRDVHQQVETKPKGKRKSEIRILKIRDGKWAYDFRPKIADETRKAQREQLWKLQKASSEFERLSRYKINIARAIANWALQWGRELSGCDIVIPVLEDLNVGSKFFDGKGKWLLGWDNRFTPKKENRWFIKVLHKAVAELAPHRGVPVYEVMPHRTSMTCPACHYCHPTNREGDRFECQSCHVVKNTDRDVAPYNILRVAVEGKTLDRWQAEKKPQAEPDRPMILIDNQES

SEQ ID NO: 235 - protein, 84 aa, synthetic construct
  REGION 1..84: note = Description of artificial sequence: synthetic polypeptide sequence
MTNLSDIIEKETGKQLVIQESILMLPEEVEEVIGNKPESDILVHTAYDESTDENVMLLTSDAPEYKPWALVIQDSNGENKIKML

SEQ ID NO: 236 - protein, 1129 aa, Alicyclobacillus acidoterrestris
  REGION 1..1129: note = MISC_FEATURE - Cas12b/C2c1; sp|T0D7A2|C2C1_ALIAG CRISPR-associated endonuclease C2c1 OS = Alicyclobacillus acido-terrestris (strain ATCC 49025 / DSM 3922/ CIP 106132 / NCIMB 13137/GD3B) GN=c2c1 PE=1 SV=1; Cas12b/C2c1 polypeptide sequence
MAVKSIKVKLRLDDMPEIRAGLWKLHKEVNAGVRYYTEWLSLLRQENLYRRSPNGDGEQECDKTAEECKAELLERLRARQVENGHRGPAGSDDELLQLARQLYELLVPQAIGAKGDAQQIARKFLSPLADKDAVGGLGIAKAGNKPRWVRMREAGEPGWEEEKEKAETRKSADRTADVLRALADFGLKPLMRVYTDSEMSSVEWKPLRKGQAVRTWDRDMFQQAIERMMSWESWNQRVGQEYAKLVEQKNRFEQKNFVGQEHLVHLVNQLQQDMKEASPGLESKEQTAHYVTGRALRGSDKVFEKWGKLAPDAPFDLYDAEIKNVQRRNTRRFGSHDLFAKLAEPEYQALWREDASFLTRYAVYNSILRKLNHAKMFATFTLPDATAHPIWTRFDKLGGNLHQYTFLFNEFGERRHAIRFHKLLKVENGVAREVDDVTVPISMSEQLDNLLPRDPNEPIALYFRDYGAEQHFTGEFGGAKIQCRRDQLAHMHRRRGARDVYLNVSVRVQSQSEARGERRPPYAAVFRLVGDNHRAFVHFDKLSDYLAEHPDDGKLGSEGLLSGLRVMSVDLGLRTSASISVFRVARKDELKPNSKGRVPFFFPIKGNDNLVAVHERSQLLKLPGETESKDLRAIREERQRTLRQLRTQLAYLRLLVRCGSEDVGRRERSWAKLIEQPVDAANHMTPDWREAFENELQKLKSLHGICSDKEWMDAVYESVRRVWRHMGKQVRDWRKDVRSGERPKIRGYAKDVVGGNSIEQIEYLERQYKFLKSWSFFGKVSGQVIRAEKGSRFAITLREHIDHAKEDRLKKLADRIIMEALGYVYALDERGKGKWVAKYPPCQLILLEELSEYQFNNDRPPSENNQLMQWSHRGVFQELINQAQVHDLLVGTMYAAFSSRFDARTGAPGIRCRRVPARCTQEHNPEPFPWWLNKFVVEHTLDACPLRADDLIPTGEGEIFVSPFSAEEGDFHQIHADLNAAQNLQQRLWSDFDISQIRLRCDWGEVDGELVLIPRLTGKRTADSYSNKVFYTNTGVTYYERERGKKRRKVFAQEKLSEEEAELLVEADEAREKSVVLMRDPSGIINRGNWTRQKEFWSMVNQRIEGYLVKQIRSRVPLQDSACENTGDI

SEQ ID NO: 237 - protein, 1368 aa, Mus musculus
  REGION 1..1368: note = MISC_FEATURE - high fidelity Cas9 polypeptide sequence
MDKKYSIGLAIGTNSVGWAVITDEYKVPSKKFKVLGNTDRHSIKKNLIGALLFDSGETAEATRLKRTARRRYTRRKNRICYLQEIFSNEMAKVDDSFFHRLEESFLVEEDKKHERHPIFGNIVDEVAYHEKYPTIYHLRKKLVDSTDKADLRLIYLALAHMIKFRGHFLIEGDLNPDNSDVDKLFIQLVQTYNQLFEENPINASGVDAKAILSARLSKSRRLENLIAQLPGEKKNGLFGNLIALSLGLTPNFKSNFDLAEDAKLQLSKDTYDDDLDNLLAQIGDQYADLFLAAKNLSDAILLSDILRVNTEITKAPLSASMIKRYDEHHQDLTLLKALVRQQLPEKYKEIFFDQSKNGYAGYIDGGASQEEFYKFIKPILEKMDGTEELLVKLNREDLLRKQRTFDNGSIPHQIHLGELHAILRRQEDFYPFLKDNREKIEKILTFRIPYYVGPLARGNSRFAWMTRKSEETITPWNFEEVVDKGASAQSFIERMTAFDKNLPNEKVLPKHSLLYEYFTVYNELTKVKYVTEGMRKPAFLSGEQKKAIVDLLFKTNRKVTVKQLKEDYFKKIECFDSVEISGVEDRFNASLGTYHDLLKIIKDKDFLDNEENEDILEDIVLTLTLFEDREMIEERLKTYAHLFDDKVMKQLKRRRYTGWGALSRKLINGIRDKQSGKTILDFLKSDGFANRNFMALIHDDSLTFKEDIQKAQVSGQGDSLHEHIANLAGSPAIKKGILQTVKVVDELVKVMGRHKPENIVIEMARENQTTQKGQKNSRERMKRIEEGIKELGSQILKEHPVENTQLQNEKLYLYYLQNGRDMYVDQELDINRLSDYDVDHIVPQSFLKDDSIDNKVLTRSDKNRGKSDNVPSEEVVKKMKNYWRQLLNAKLITQRKFDNLTKAERGGLSELDKAGFIKRQLVETRAITKHVAQILDSRMNTKYDENDKLIREVKVITLKSKLVSDFRKDFQFYKVREINNYHHAHDAYLNAVVGTALIKKYPKLESEFVYGDYKVYDVRKMIAKSEQEIGKATAKYFFYSNIMNFFKTEITLANGEIRKRPLIETNGETGEIVWDKGRDFATVRKVLSMPQVNIVKKTEVQTGGFSKESILPKRNSDKLIARKKDWDPKKYGGFDSPTVAYSVLVVAKVEKGKSKKLKSVKELLGITIMERSSFEKNPIDFLEAKGYKEVKKDLIIKLPKYSLFELENGRKRMLASAGELQKGNELALPSKYVNFLYLASHYEKLKGSPEDNEQKQLFVEQHKHYLDEIIEQISEFSKRVILADANLDKVLSAYNKHRDKPIREQAENIIHLFTLTNLGAPAAFKYFDTTIDRKRYTSTKEVLDATLIHQSITGLYETRIDLSQLGGD

SEQ ID NO: 238 - protein, 1368 aa, Streptococcus pyogenes
  REGION 1..1368: note = MISC_FEATURE - PAM-binding SpEQR Cas9 polypeptide sequence
MDKKYSIGLAIGTNSVGWAVITDEYKVPSKKFKVLGNTDRHSIKKNLIGALLFDSGETAEATRLKRTARRRYTRRKNRICYLQEIFSNEMAKVDDSFFHRLEESVLVEEDKKHERHPIFGNIVDEVAYHEKYPTIYHLRKKLVDSTDKADLRLIYLALAHMIKFRGHFLIEGDLNPDNSDVDKLFIQLVQTYNQLFEENPINASGVDAKAILSARLSKSRRLENLIAQLPGEKKNGLFGNLIALSLGLTPNFKSNFDLAEDAKLQLSKDTYDDDLDNLLAQIGDQYADLFLAAKNLSDAILLSDILRVNTEITKAPLSASMIKRYDEHHQDLTLLKALVRQQLPEKYKEIFFDQSKNGYAGYIDGGASQEEFYKFIKPILEKMDGTEELLVKLNREDLLRKQRTFDNGSIPHQIHLGELHAILRRQEDFYPFLKDNREKIEKILTFRIPYYVGPLARGNSRFAWMTRKSEETITPWNFEEVVDKGASAQSFIERMTNFDKNLPNEKVLPKHSLLYEYFTVYNELTKVKYVTEGMRKPAFLSGEQKKAIVDLLFKTNRKVTVKQLKEDYFKKIECFDSVEISGVEDRFNASLGTYHDLLKIIKDKDFLDNEENEDILEDIVLTLTLFEDREMIEERLKTYAHLFDDKVMKQLKRRRYTGWGRLSRKLINGIRDKQSGKTILDFLKSDGFANRNFMQLIHDDSLTFKEDIQKAQVSGQGDSLHEHIANLAGSPAIKKGILQTVKVVDELVKVMGRHKPENIVIEMARENQTTQKGQKNSRERMKRIEEGIKELGSQILKEHPVENTQLQNEKLYLYYLQNGRDMYVDQELDINRLSDYDVDHIVPQSFLKDDSIDNKVLTRSDKNRGKSDNVPSEEVVKKMKNYWRQLLNAKLITQRKFDNLTKAERGGLSELDKAGFIKRQLVETRQITKHVAQILDSRMNTKYDENDKLIREVKVITLKSKLVSDFRKDFQFYKVREINNYHHAHDAYLNAVVGTALIKKYPKLESEFVYGDYKVYDVRKMIAKSEQEIGKATAKYFFYSNIMNFFKTEITLANGEIRKRPLIETNGETGEIVWDKGRDFATVRKVLSMPQVNIVKKTEVQTGGFSKESILPKRNSDKLIARKKDWDPKKYGGFESPTVAYSVLVVAKVEKGKSKKLKSVKELLGITIMERSSFEKNPIDFLEAKGYKEVKKDLIIKLPKYSLFELENGRKRMLASAGELQKGNELALPSKYVNFLYLASHYEKLKGSPEDNEQKQLFVEQHKHYLDEIIEQISEFSKRVILADANLDKVLSAYNKHRDKPIREQAENIIHLFTLTNLGAPAAFKYFDTTIDRKQYRSTKEVLDATLIHQSITGLYETRIDLSQLGGD

SEQ ID NO: 239 - protein, 1368 aa, Streptococcus pyogenes
  REGION 1..1368: note = MISC_FEATURE - PAM-binding SpVQR Cas9 polypeptide sequence
MDKKYSIGLAIGTNSVGWAVITDEYKVPSKKFKVLGNTDRHSIKKNLIGALLFDSGETAEATRLKRTARRRYTRRKNRICYLQEIFSNEMAKVDDSFFHRLEESFLVEEDKKHERHPIFGNIVDEVAYHEKYPTIYHLRKKLVDSTDKADLRLIYLALAHMIKFRGHFLIEGDLNPDNSDVDKLFIQLVQTYNQLFEENPINASGVDAKAILSARLSKSRRLENLIAQLPGEKKNGLFGNLIALSLGLTPNFKSNFDLAEDAKLQLSKDTYDDDLDNLLAQIGDQYADLFLAAKNLSDAILLSDILRVNTEITKAPLSASMIKRYDEHHQDLTLLKALVRQQLPEKYKEIFFDQSKNGYAGYIDGGASQEEFYKFIKPILEKMDGTEELLVKLNREDLLRKQRTFDNGSIPHQIHLGELHAILRRQEDFYPFLKDNREKIEKILTFRIPYYVGPLARGNSRFAWMTRKSEETITPWNFEEVVDKGASAQSFIERMTNFDKNLPNEKVLPKHSLLYEYFTVYNELTKVKYVTEGMRKPAFLSGEQKKAIVDLLFKTNRKVTVKQLKEDYFKKIECFDSVEISGVEDRFNASLGTYHDLLKIIKDKDFLDNEENEDILEDIVLTLTLFEDREMIEERLKTYAHLFDDKVMKQLKRRRYTGWGRLSRKLINGIRDKQSGKTILDFLKSDGFANRNFMQLIHDDSLTFKEDIQKAQVSGQGDSLHEHIANLAGSPAIKKGILQTVKVVDELVKVMGRHKPENIVIEMARENQTTQKGQKNSRERMKRIEEGIKELGSQILKEHPVENTQLQNEKLYLYYLQNGRDMYVDQELDINRLSDYDVDHIVPQSFLKDDSIDNKVLTRSDKNRGKSDNVPSEEVVKKMKNYWRQLLNAKLITQRKFDNLTKAERGGLSELDKAGFIKRQLVETRQITKHVAQILDSRMNTKYDENDKLIREVKVITLKSKLVSDFRKDFQFYKVREINNYHHAHDAYLNAVVGTALIKKYPKLESEFVYGDYKVYDVRKMIAKSEQEIGKATAKYFFYSNIMNFFKTEITLANGEIRKRPLIETNGETGEIVWDKGRDFATVRKVLSMPQVNIVKKTEVQTGGFSKESILPKRNSDKLIARKKDWDPKKYGGFVSPTVAYSVLVVAKVEKGKSKKLKSVKELLGITIMERSSFEKNPIDFLEAKGYKEVKKDLIIKLPKYSLFELENGRKRMLASAGELQKGNELALPSKYVNFLYLASHYEKLKGSPEDNEQKQLFVEQHKHYLDEIIEQISEFSKRVILADANLDKVLSAYNKHRDKPIREQAENIIHLFTLTNLGAPAAFKYFDTTIDRKQYRSTKEVLDATLIHQSITGLYETRIDLSQLGGD

SEQ ID NO: 240 - protein, 1368 aa, Streptococcus pyogenes
  REGION 1..1368: note = MISC_FEATURE - SpVQR Cas9 polypeptide sequence
MDKKYSIGLAIGTNSVGWAVITDEYKVPSKKFKVLGNTDRHSIKKNLIGALLFDSGETAEATRLKRTARRRYTRRKNRICYLQEIFSNEMAKVDDSFFHRLEESFLVEEDKKHERHPIFGNIVDEVAYHEKYPTIYHLRKKLVDSTDKADLRLIYLALAHMIKFRGHFLIEGDLNPDNSDVDKLFIQLVQTYNQLFEENPINASGVDAKAILSARLSKSRRLENLIAQLPGEKKNGLFGNLIALSLGLTPNFKSNFDLAEDAKLQLSKDTYDDDLDNLLAQIGDQYADLFLAAKNLSDAILLSDILRVNTEITKAPLSASMIKRYDEHHQDLTLLKALVRQQLPEKYKEIFFDQSKNGYAGYIDGGASQEEFYKFIKPILEKMDGTEELLVKLNREDLLRKQRTFDNGSIPHQIHLGELHAILRRQEDFYPFLKDNREKIEKILTFRIPYYVGPLARGNSRFAWMTRKSEETITPWNFEEVVDKGASAQSFIERMTNFDKNLPNEKVLPKHSLLYEYFTVYNELTKVKYVTEGMRKPAFLSGEQKKAIVDLLFKTNRKVTVKQLKEDYFKKIECFDSVEISGVEDRFNASLGTYHDLLKIIKDKDFLDNEENEDILEDIVLTLTLFEDREMIEERLKTYAHLFDDKVMKQLKRRRYTGWGRLSRKLINGIRDKQSGKTILDFLKSDGFANRNFMQLIHDDSLTFKEDIQKAQVSGQGDSLHEHIANLAGSPAIKKGILQTVKVVDELVKVMGRHKPENIVIEMARENQTTQKGQKNSRERMKRIEEGIKELGSQILKEHPVENTQLQNEKLYLYYLQNGRDMYVDQELDINRLSDYDVDHIVPQSFLKDDSIDNKVLTRSDKNRGKSDNVPSEEVVKKMKNYWRQLLNAKLITQRKFDNLTKAERGGLSELDKAGFIKRQLVETRQITKHVAQILDSRMNTKYDENDKLIREVKVITLKSKLVSDFRKDFQFYKVREINNYHHAHDAYLNAVVGTALIKKYPKLESEFVYGDYKVYDVRKMIAKSEQEIGKATAKYFFYSNIMNFFKTEITLANGEIRKRPLIETNGETGEIVWDKGRDFATVRKVLSMPQVNIVKKTEVQTGGFSKESILPKRNSDKLIARKKDWDPKKYGGFVSPTVAYSVLVVAKVEKGKSKKLKSVKELLGITIMERSSFEKNPIDFLEAKGYKEVKKDLIIKLPKYSLFELENGRKRMLASARELQKGNELALPSKYVNFLYLASHYEKLKGSPEDNEQKQLFVEQHKHYLDEIIEQISEFSKRVILADANLDKVLSAYNKHRDKPIREQAENIIHLFTLTNLGAPAAFKYFDTTIDRKEYRSTKEVLDATLIHQSITGLYETRIDLSQLGGD

SEQ ID NO: 241 - protein, 1359 aa, Streptococcus macacae
  REGION 1..1359: note = MISC_FEATURE - SpyMacCas9 polypeptide sequence
MDKKYSIGLDIGTNSVGWAVITDDYKVPSKKFKVLGNTDRHSIKKNLIGALLFGSGETAEATRLKRTARRRYTRRKNRICYLQEIFSNEMAKVDDSFFHRLEESFLVEEDKKHERHPIFGNIVDEVAYHEKYPTIYHLRKKLADSTDKADLRLIYLALAHMIKFRGHFLIEGDLNPDNSDVDKLFIQLVQIYNQLFEENPINASRVDAKAILSARLSKSRRLENLIAQLPGEKRNGLFGNLIALSLGLTPNFKSNFDLAEDAKLQLSKDTYDDDLDNLLAQIGDQYADLFLAAKNLSDAILLSDILRVNSEITKAPLSASMIKRYDEHHQDLTLLKALVRQQLPEKYKEIFFDQSKNGYAGYIDGGASQEEFYKFIKPILEKMDGTEELLVKLNREDLLRKQRTFDNGSIPHQIHLGELHAILRRQEDFYPFLKDNREKIEKILTFRIPYYVGPLARGNSRFAWMTRKSEETITPWNFEEVVDKGASAQSFIERMTNFDKNLPNEKVLPKHSLLYEYFTVYNELTKVKYVTEGMRKPAFLSGEQKKAIVDLLFKTNRKVTVKQLKEDYFKKIECFDSVEISGVEDRFNASLGAYHDLLKIIKDKDFLDNEENEDILEDIVLTLTLFEDRGMIEERLKTYAHLFDDKVMKQLKRRRYTGWGRLSRKLINGIRDKQSGKTILDFLKSDGFANRNFMQLIHDDSLTFKEDIQKAQVSGQGHSLHEQIANLAGSPAIKKGILQTVKIVDELVKVMGHKPENIVIEMARENQTTQKGQKNSRERMKRIEEGIKELGSQILKEHPVENTQLQNEKLYLYYLQNGRDMYVDQELDINRLSDYDVDHIVPQSFIKDDSIDNKVLTRSDKNRGKSDNVPSEEVVKKMKNYWRQLLNAKLITQRKFDNLTKAERGGLSELDKAGFIKRQLVETRQITKHVAQILDSRMNTKYDENDKLIREVKVITLKSKLVSDFRKDFQFYKVREINNYHHAHDAYLNAVVGTALIKKYPKLESEFVYGDYKVYDVRKMIAKSEQEIGKATAKYFFYSNIMNFFKTEITLANGEIRKRPLIETNGETGEIVWDKGRDFATVRKVLSMPQVNIVKKTEIQTVGQNGGLFDDNPKSPLEVTPSKLVPLKKELNPKKYGGYQKPTTAYPVLLITDTKQLIPISVMNKKQFEQNPVKFLRDRGYQQVGKNDFIKLPKYTLVDIGDGIKRLWASSKEIHKGNQLVVSKKSQILLYHAHHLDSDLSNDYLQNHNQQFDVLFNEIISFSKKCKLGKEHIQKIENVYSNKKNSASIEELAESFIKLLGFTQLGATSPFNFLGVKLNQKQYKGKKDYILPCTEGTLIRQSITGLYETRVDLSKIGED

SEQ ID NO: 242 - protein, 1410 aa, synthetic construct
  REGION 1..1410: note = Description of artificial sequence: CP5 polypeptide sequence
  REGION 1..341: note = MISC_FEATURE - Sequence derived from Cas9
  REGION 342..362: note = MISC_FEATURE - Linker sequence
  REGION 363..1388: note = MISC_FEATURE - Sequence derived from Cas9
  REGION 1389..1410: note = MISC_FEATURE - Bipartite nuclear localization sequence
EIGKATAKYFFYSNIMNFFKTEITLANGEIRKRPLIETNGETGEIVWDKGRDFATVRKVLSMPQVNIVKKTEVQTGGFSKESILPKRNSDKLIARKKDWDPKKYGGFMQPTVAYSVLVVAKVEKGKSKKLKSVKELLGITIMERSSFEKNPIDFLEAKGYKEVKKDLIIKLPKYSLFELENGRKRMLASAKFLQKGNELALPSKYVNFLYLASHYEKLKGSPEDNEQKQLFVEQHKHYLDEIIEQISEFSKRVILADANLDKVLSAYNKHRDKPIREQAENIIHLFTLTNLGAPRAFKYFDTTIARKEYRSTKEVLDATLIHQSITGLYETRIDLSQLGGDGGSGGSGGSGGSGGSGGSGGMDKKYSIGLAIGTNSVGWAVITDEYKVPSKKFKVLGNTDRHSIKKNLIGALLFDSGETAEATRLKRTARRRYTRRKNRICYLQEIFSNEMAKVDDSFFHRLEESFLVEEDKKHERHPIFGNIVDEVAYHEKYPTIYHLRKKLVDSTDKADLRLIYLALAHMIKFRGHFLIEGDLNPDNSDVDKLFIQLVQTYNQLFEENPINASGVDAKAILSARLSKSRRLENLIAQLPGEKKNGLFGNLIALSLGLTPNFKSNFDLAEDAKLQLSKDTYDDDLDNLLAQIGDQYADLFLAAKNLSDAILLSDILRVNTEITKAPLSASMIKRYDEHHQDLTLLKALVRQQLPEKYKEIFFDQSKNGYAGYIDGGASQEEFYKFIKPILEKMDGTEELLVKLNREDLLRKQRTFDNGSIPHQIHLGELHAILRRQEDFYPFLKDNREKIEKILTFRIPYYVGPLARGNSRFAWMTRKSEETITPWNFEEVVDKGASAQSFIERMTNFDKNLPNEKVLPKHSLLYEYFTVYNELTKVKYVTEGMRKPAFLSGEQKKAIVDLLFKTNRKVTVKQLKEDYFKKIECFDSVEISGVEDRFNASLGTYHDLLKIIKDKDFLDNEENEDILEDIVLTLTLFEDREMIEERLKTYAHLFDDKVMKQLKRRRYTGWGRLSRKLINGIRDKQSGKTILDFLKSDGFANRNFMQLIHDDSLTFKEDIQKAQVSGQGDSLHEHIANLAGSPAIKKGILQTVKVVDELVKVMGRHKPENIVIEMARENQTTQKGQKNSRERMKRIEEGIKELGSQILKEHPVENTQLQNEKLYLYYLQNGRDMYVDQELDINRLSDYDVDHIVPQSFLKDDSIDNKVLTRSDKNRGKSDNVPSEEVVKKMKNYWRQLLNAKLITQRKFDNLTKAERGGLSELDKAGFIKRQLVETRQITKHVAQILDSRMNTKYDENDKLIREVKVITLKSKLVSDFRKDFQFYKVREINNYHHAHDAYLNAVVGTALIKKYPKLESEFVYGDYKVYDVRKMIAKSEQEGADKRTADGSEFESPKKKRKV

SEQ ID NO: 243 - protein, 1302 aa, synthetic construct
  REGION 1..1302: note = Description of artificial sequence: Cas12c1 polypeptide sequence
MQTKKTHLHLISAKASRKYRRTIACLSDTAKKDLERRKQSGAADPAQELSCLKTIKFKLEVPEGSKLPSFDRISQIYNALETIEKGSLSYLLFALILSGFRIFPNSSAAKTFASSSCYKNDQFASQIKEIFGEMVKNFIPSELESILKKGRRKNNKDWTEENIKRVLNSEFGRKNSEGSSALFDSFLSKFSQELFRKFDSWNEVNKKYLEAAELLDSMLASYGPFDSVCKMIGDSDSRNSLPDKSTIAFTNNAEITVDIESSVMPYMAIAALLREYRQSKSKAAPVAYVQSHLTTTNGNGLSWFFKFGLDLIRKAPVSSKQSTSDGSKSLQELFSVPDDKLDGLKFIKEACEALPEASLLCGEKGELLGYQDFRTSFAGHIDSWVANYVNRLFELIELVNQLPESIKLPSILTQKNHNLVASLGLQEAEVSHSLELFEGLVKNVRQTLKKLAGIDISSSPNEQDIKEFYAFSDVLNRLGSIRNQIENAVQTAKKDKIDLESAIEWKEWKKLKKLPKLNGLGGGVPKQQELLDKALESVKQIRHYQRIDFERVIQWAVNEHCLETVPKFLVDAEKKKINKESSTDFAAKENAVRFLLEGIGAAARGKTDSVSKAAYNWFVVNNFLAKKDLNRYFINCQGCIYKPPYSKRRSLAFALRSDNKDTIEVVWEKFETFYKEISKEIEKFNIFSQEFQTFLHLENLRMKLLLRRIQKPIPAEIAFFSLPQEYYDSLPPNVAFLALNQEITPSEYITQFNLYSSFLNGNLILLRRSRSYLRAKFSWVGNSKLIYAAKEARLWKIPNAYWKSDEWKMILDSNVLVFDKAGNVLPAPTLKKVCEREGDLRLFYPLLRQLPHDWCYRNPFVKSVGREKNVIEVNKEGEPKVASALPGSLFRLIGPAPFKSLLDDCFFNPLDKDLRECMLIVDQEISQKVEAQKVEASLESCTYSIAVPIRYHLEEPKVSNQFENVLAIDQGEAGLAYAVFSLKSIGEAETKPIAVGTIRIPSIRRLIHSVSTYRKKKQRLQNFKQNYDSTAFIMRENVTGDVCAKIVGLMKEFNAFPVLEYDVKNLESGSRQLSAVYKAVNSHFLYFKEPGRDALRKQLWYGGDSWTIDGIEIVTRERKEDGKEGVEKIVPLKVFPGRSVSARFTSKTCSCCGRNVFDWLFTEKKAKTNKKFNVNSKGELTTADGVIQLFEADRSKGPKFYARRKERTPLTKPIAKGSYSLEEIERRVRTNLRRAPKSKQSRDTSQSQYFCVYKDCALHFSGMQADENAAINIGRRFLTALRKNRRSDFPSNVKISDRLLDN

SEQ ID NO: 244 - protein, 1218 aa, synthetic construct
  REGION 1..1218: note = Description of artificial sequence: Cas12c2 polypeptide sequence
MTKHSIPLHAFRNSGADARKWKGRIALLAKRGKETMRTLQFPLEMSEPEAAAINTTPFAVAYNAIEGTGKGTLFDYWAKLHLAGFRFFPSGGAATIFRQQAVFEDASWNAAFCQQSGKDWPWLVPSKLYERFTKAPREVAKKDGSKKSIEFTQENVANESHVSLVGASITDKTPEDQKEFFLKMAGALAEKFDSWKSANEDRIVAMKVIDEFLKSEGLHLPSLENIAVKCSVETKPDNATVAWHDAPMSGVQNLAIGVFATCASRIDNIYDLNGGKLSKLIQESATTPNVTALSWLFGKGLEYFRTTDIDTIMQDFNIPASAKESIKPLVESAQAIPTMTVLGKKNYAPFRPNFGGKIDSWIANYASRLMLLNDILEQIEPGFELPQALLDNETLMSGIDMTGDELKELIEAVYAWVDAAKQGLATLLGRGGNVDDAVQTFEQFSAMMDTLNGTLNTISARYVRAVEMAGKDEARLEKLIECKFDIPKWCKSVPKLVGISGGLPKVEEEIKVMNAAFKDVRARMFVRFEEIAAYVASKGAGMDVYDALEKRELEQIKKLKSAVPERAHIQAYRAVLHRIGRAVQNCSEKTKQLFSSKVIEMGVFKNPSHLNNFIFNQKGAIYRSPFDRSRHAPYQLHADKLLKNDWLELLAEISATLMASESTEQMEDALRLERTRLQLQLSGLPDWEYPASLAKPDIEVEIQTALKMQLAKDTVTSDVLQRAFNLYSSVLSGLTFKLLRRSFSLKMRFSVADTTQLIYVPKVCDWAIPKQYLQAEGEIGIAARVVTESSPAKMVTEVEMKEPKALGHFMQQAPHDWYFDASLGGTQVAGRIVEKGKEVGKERKLVGYRMRGNSAYKTVLDKSLVGNTELSQCSMIIEIPYTQTVDADFRAQVQAGLPKVSINLPVKETITASNKDEQMLFDRFVAIDLGERGLGYAVFDAKTLELQESGHRPIKAITNLLNRTHHYEQRPNQRQKFQAKFNVNLSELRENTVGDVCHQINRICAYYNAFPVLEYMVPDRLDKQLKSVYESVTNRYIWSSTDAHKSARVQFWLGGETWEHPYLKSAKDKKPLVLSPGRGASGKGTSQTCSCCGRNPFDLIKDMKPRAKIAVVDGKAKLENSELKLFERNLESKDDMLARRHRNERAGMEQPLTPGNYTVDEIKALLRANLRRAPKNRRTKDTTVSEYHCVFSDCGKTMHADENAAVNIGGKFIADIEK

SEQ ID NO: 245 - protein, 1252 aa, Oleiphilus sp.
  REGION 1..1252: note = MISC_FEATURE - OspCas12c polypeptide sequence
  source 1..1252: note = HI0009
MTKLRHRQKKLTHDWAGSKKREVLGSNGKLQNPLLMPVKKGQVTEFRKAFSAYARATKGEMTDGRKNMFTHSFEPFKTKPSLHQCELADKAYQSLHSYLPGSLAHFLLSAHALGFRIFSKSGEATAFQASSKIEAYESKLASELACVDLSIQNLTISTLFNALTTSVRGKGEETSADPLIARFYTLLTGKPLSRDTQGPERDLAEVISRKIASSFGTWKEMTANPLQSLQFFEEELHALDANVSLSPAFDVLIKMNDLQGDLKNRTIVFDPDAPVFEYNAEDPADIIIKLTARYAKEAVIKNQNVGNYVKNAITTTNANGLGWLLNKGLSLLPVSTDDELLEFIGVERSHPSCHALIELIAQLEAPELFEKNVFSDTRSEVQGMIDSAVSNHIARLSSSRNSLSMDSEELERLIKSFQIHTPHCSLFIGAQSLSQQLESLPEALQSGVNSADILLGSTQYMLTNSLVEESIATYQRTLNRINYLSGVAGQINGAIKRKAIDGEKIHLPAAWSELISLPFIGQPVIDVESDLAHLKNQYQTLSNEFDTLISALQKNFDLNFNKALLNRTQHFEAMCRSTKKNALSKPEIVSYRDLLARLTSCLYRGSLVLRRAGIEVLKKHKIFESNSELREHVHERKHFVFVSPLDRKAKKLLRLTDSRPDLLHVIDEILQHDNLENKDRESLWLVRSGYLLAGLPDQLSSSFINLPIITQKGDRRLIDLIQYDQINRDAFVMLVTSAFKSNLSGLQYRANKQSFVVTRTLSPYLGSKLVYVPKDKDWLVPSQMFEGRFADILQSDYMVWKDAGRLCVIDTAKHLSNIKKSVFSSEEVLAFLRELPHRTFIQTEVRGLGVNVDGIAFNNGDIPSLKTFSNCVQVKVSRTNTSLVQTLNRWFEGGKVSPPSIQFERAYYKKDDQIHEDAAKRKIRFQMPATELVHASDDAGWTPSYLLGIDPGEYGMGLSLVSINNGEVLDSGFIHINSLINFASKKSNHQTKVVPRQQYKSPYANYLEQSKDSAAGDIAHILDRLIYKLNALPVFEALSGNSQSAADQVWTKVLSFYTWGDNDAQNSIRKQHWFGASHWDIKGMLRQPPTEKKPKPYIAFPGSQVSSYGNSQRCSCCGRNPIEQLREMAKDTSIKELKIRNSEIQLFDGTIKLFNPDPSTVIERRRHNLGPSRIPVADRTFKNISPSSLEFKELITIVSRSIRHSPEFIAKKRGIGSEYFCAYSDCNSSLNSEANAAANVAQKFQKQLFFEL

SEQ ID NO: 246 - protein, 767 aa, synthetic construct
  REGION 1..767: note = Description of artificial sequence: Cas12g1 polypeptide sequence
MAQASSTPAVSPRPRPRYREERTLVRKLLPRPGQSKQEFRENVKKLRKAFLQFNADVSGVCQWAIQFRPRYGKPAEPTETFWKFFLEPETSLPPNDSRSPEFRRLQAFEAAAGINGAAALDDPAFTNELRDSILAVASRPKTKEAQRLFSRLKDYQPAHRMILAKVAAEWIESRYRRAHQNWERNYEEWKKEKQEWEQNHPELTPEIREAFNQIFQQLEVKEKRVRICPAARLLQNKDNCQYAGKNKHSVLCNQFNEFKKNHLQGKAIKFFYKDAEKYLRCGLQSLKPNVQGPFREDWNKYLRYMNLKEETLRGKNGGRLPHCKNLGQECEFNPHTALCKQYQQQLSSRPDLVQHDELYRKWRREYWREPRKPVFRYPSVKRHSIAKIFGENYFQADFKNSVVGLRLDSMPAGQYLEFAFAPWPRNYRPQPGETEISSVHLHFVGTRPRIGFRFRVPHKRSRFDCTQEELDELRSRTFPRKAQDQKFLEAARKRLLETFPGNAEQELRLLAVDLGTDSARAAFFIGKTFQQAFPLKIVKIEKLYEQWPNQKQAGDRRDASSKQPRPGLSRDHVGRHLQKMRAQASEIAQKRQELTGTPAPETTTDQAAKKATLQPFDLRGLTVHTARMIRDWARLNARQIIQLAEENQVDLIVLESLRGFRPPGYENLDQEKKRRVAFFAHGRIRRKVTEKAVERGMRVVTVPYLASSKVCAECRKKQKDNKQWEKNKKRGLFKCEGCGSQAQVDENAARVLGRVFWGEIELPTAIP

SEQ ID NO: 247 - protein, 870 aa, synthetic construct
  REGION 1..870: note = Description of artificial sequence: Cas12h1 polypeptide sequence
MKVHEIPRSQLLKIKQYEGSFVEWYRDLQEDRKKFASLLFRWAAFGYAAREDDGATYISPSQALLERRLLLGDAEDVAIKFLDVLFKGGAPSSSCYSLFYEDFALRDKAKYSGAKREFIEGLATMPLDKIIERIRQDEQLSKIPAEEWLILGAEYSPEEIWEQVAPRIVNVDRSLGKQLRERLGIKCRRPHDAGYCKILMEVVARQLRSHNETYHEYLNQTHEMKTKVANNLTNEFDLVCEFAEVLEEKNYGLGWYVLWQGVKQALKEQKKPTKIQIAVDQLRQPKFAGLLTAKWRALKGAYDTWKLKKRLEKRKAFPYMPNWDNDYQIPVGLTGLGVFTLEVKRTEVVVDLKEHGKLFCSHSHYFGDLTAEKHPSRYHLKFRHKLKLRKRDSRVEPTIGPWIEAALREITIQKKPNGVFYLGLPYALSHGIDNFQIAKRFFSAAKPDKEVINGLPSEMVVGAADLNLSNIVAPVKARIGKGLEGPLHALDYGYGELIDGPKILTPDGPRCGELISLKRDIVEIKSAIKEFKACQREGLTMSEETTTWLSEVESPSDSPRCMIQSRIADTSRRLNSFKYQMNKEGYQDLAEALRLLDAMDSYNSLLESYQRMHLSPGEQSPKEAKFDTKRASFRDLLRRRVAHTIVEYFDDCDIVFFEDLDGPSDSDSRNNALVKLLSPRTLLLYIRQALEKRGIGMVEVAKDGTSQNNPISGHVGWRNKQNKSEIYFYEDKELLVMDADEVGAMNILCRGLNHSVCPYSFVTKAPEKKNDEKKEGDYGKRVKRFLKDRYGSSNVRFLVASMGFVTVTTKRPKDALVGKRLYYHGGELVTHDLHNRMKDEIKYLVEKEVLARRVSLSDSTIKSYKSFAHV

SEQ ID NO: 248 - protein, 1093 aa, synthetic construct
  REGION 1..1093: note = Description of artificial sequence: Cas12i1 polypeptide sequence
MSNKEKNASETRKAYTTKMIPRSHDRMKLLGNFMDYLMDGTPIFFELWNQFGGGIDRDIISGTANKDKISDDLLLAVNWFKVMPINSKPQGVSPSNLANLFQQYSGSEPDIQAQEYFASNFDTEKHQWKDMRVEYERLLAELQLSRSDMHHDLKLMYKEKCIGLSLSTAHYITSVMFGTGAKNNRQTKHQFYSKVIQLLEESTQINSVEQLASIILKAGDCDSYRKLRIRCSRKGATPSILKIVQDYELGTNHDDEVNVPSLIANLKEKLGRFEYECEWKCMEKIKAFLASKVGPYYLGSYSAMLENALSPIKGMTTKNCKFVLKQIDAKNDIKYENEPFGKIVEGFFDSPYFESDTNVKWVLHPHHIGESNIKTLWEDLNAIHSKYEEDIASLSEDKKEKRIKVYQGDVCQTINTYCEEVGKEAKTPLVQLLRYLYSRKDDIAVDKIIDGITFLSKKHKVEKQKINPVIQKYPSFNFGNNSKLLGKIISPKDKLKHNLKCNRNQVDNYIWIEIKVLNTKTMRWEKHHYALSSTRFLEEVYYPATSENPPDALAARFRTKTNGYEGKPALSAEQIEQIRSAPVGLRKVKKRQMRLEAARQQNLLPRYTWGKDFNINICKRGNNFEVTLATKVKKKKEKNYKVVLGYDANIVRKNTYAAIEAHANGDGVIDYNDLPVKPIESGFVTVESQVRDKSYDQLSYNGVKLLYCKPHVESRRSFLEKYRNGTMKDNRGNNIQIDFMKDFEAIADDETSLYYFNMKYCKLLQSSIRNHSSQAKEYREEIFELLRDGKLSVLKLSSLSNLSFVMFKVAKSLIGTYFGHLLKKPKNSKSDVKAPPITDEDKQKADPEMFALRLALEEKRLNKVKSKKEVIANKIVAKALELRDKYGPVLIKGENISDTTKKGKKSSTNSFLMDWLARGVANKVKEMVMMHQGLEFVEVNPNFTSHQDPFVHKNPENTFRARYSRCTPSELTEKNRKEILSFLSDKPSKRPTNAYYNEGAMAFLATYGLKKNDVLGVSLEKFKQIMANILHQRSEDQLLFPSRGGMFYLATYKLDADATSVNWNGKQFWVCNADLVAAYNVGLVDIQKDFKKK

SEQ ID NO: 249 - protein, 1054 aa, synthetic construct
  REGION 1..1054: note = Description of artificial sequence: Cas12i2 polypeptide sequence
MSSAIKSYKSVLRPNERKNQLLKSTIQCLEDGSAFFFKMLQGLFGGITPEIVRFSTEQEKQQQDIALWCAVNWFRPVSQDSLTHTIASDNLVEKFEEYYGGTASDAIKQYFSASIGESYYWNDCRQQYYDLCRELGVEVSDLTHDLEILCREKCLAVATESNQNNSIISVLFGTGEKEDRSVKLRITKKILEAISNLKEIPKNVAPIQEIILNVAKATKETFRQVYAGNLGAPSTLEKFIAKDGQKEFDLKKLQTDLKKVIRGKSKERDWCCQEELRSYVEQNTIQYDLWAWGEMFNKAHTALKIKSTRNYNFAKQRLEQFKEIQSLNNLLVVKKLNDFFDSEFFSGEETYTICVHHLGGKDLSKLYKAWEDDPADPENAIVVLCDDLKNNFKKEPIRNILRYIFTIRQECSAQDILAAAKYNQQLDRYKSQKANPSVLGNQGFTWTNAVILPEKAQRNDRPNSLDLRIWLYLKLRHPDGRWKKHHIPFYDTRFFQEIYAAGNSPVDTCQFRTPRFGYHLPKLTDQTAIRVNKKHVKAAKTEARIRLAIQQGTLPVSNLKITEISATINSKGQVRIPVKFDVGRQKGTLQIGDRFCGYDQNQTASHAYSLWEVVKEGQYHKELGCFVRFISSGDIVSITENRGNQFDQLSYEGLAYPQYADWRKKASKFVSLWQITKKNKKKEIVTVEAKEKFDAICKYQPRLYKFNKEYAYLLRDIVRGKSLVELQQIRQEIFRFIEQDCGVTRLGSLSLSTLETVKAVKGIIYSYFSTALNASKNNPISDEQRKEFDPELFALLEKLELIRTRKKKQKVERIANSLIQTCLENNIKFIRGEGDLSTTNNATKKKANSRSMDWLARGVFNKIRQLAPMHNITLFGCGSLYTSHQDPLVHRNPDKAMKCRWAAIPVKDIGDWVLRKLSQNLRAKNIGTGEYYHQGVKEFLSHYELQDLEEELLKWRSDRKSNIPCWVLQNRLAEKLGNKEAVVYIPVRGGRIYFATHKVATGAVSIVFDQKQVWVCNADHVAAANIALTVKGIGEQSSDEENPDGSRIKLQLTS

SEQ ID NO: 250 - protein, 4 aa, synthetic construct
  REGION 1..4: note = Description of artificial sequence: synthetic peptide sequence
GGGS

SEQ ID NO: 251 - protein, 5 aa, synthetic construct
  REGION 1..5: note = Description of artificial sequence: synthetic peptide sequence
GGGGS

SEQ ID NO: 252 - protein, 5 aa, synthetic construct
  REGION 1..5: note = Description of artificial sequence: synthetic peptide sequence
EAAAK

SEQ ID NO: 253 - protein, 16 aa, synthetic construct
  REGION 1..16: note = Description of artificial sequence: synthetic peptide sequence
SGSETPGTSESATPES

SEQ ID NO: 254 - protein, 6 aa, synthetic construct
  REGION 1..6: note = Description of artificial sequence: linker peptide sequence
GGSGGS

SEQ ID NO: 255 - protein, 20 aa, synthetic construct
  REGION 1..20: note = Description of artificial sequence: synthetic peptide sequence
GSSGSETPGTSESATPESSG

SEQ ID NO: 256 - DNA, 18 bp, synthetic construct
  misc_feature 1..18: note = Description of artificial sequence: synthetic oligonucleotide sequence
  source 1..18: mol_type = other DNA
ggaggctctggaggaagc

SEQ ID NO: 257 - DNA, 60 bp, synthetic construct
  misc_feature 1..60: note = Description of artificial sequence: synthetic oligonucleotide sequence
  source 1..60: mol_type = other DNA
ggctcttctggatctgaaacacctggcacaagcgagagcgccacccctgagagctctggc

SEQ ID NO: 258 - protein, 1129 aa, Alicyclobacillus acidiphilus
  REGION 1..1129: note = MISC_FEATURE - AacCas12b polypeptide sequence
MAVKSMKVKLRLDNMPEIRAGLWKLHTEVNAGVRYYTEWLSLLRQENLYRRSPNGDGEQECYKTAEECKAELLERLRARQVENGHCGPAGSDDELLQLARQLYELLVPQAIGAKGDAQQIARKFLSPLADKDAVGGLGIAKAGNKPRWVRMREAGEPGWEEEKAKAEARKSTDRTADVLRALADFGLKPLMRVYTDSDMSSVQWKPLRKGQAVRTWDRDMFQQAIERMMSWESWNQRVGEAYAKLVEQKSRFEQKNFVGQEHLVQLVNQLQQDMKEASHGLESKEQTAHYLTGRALRGSDKVFEKWEKLDPDAPFDLYDTEIKNVQRRNTRRFGSHDLFAKLAEPKYQALWREDASFLTRYAVYNSIVRKLNHAKMFATFTLPDATAHPIWTRFDKLGGNLHQYTFLFNEFGEGRHAIRFQKLLTVEDGVAKEVDDVTVPISMSAQLDDLLPRDPHELVALYFQDYGAEQHLAGEFGGAKIQYRRDQLNHLHARRGARDVYLNLSVRVQSQSEARGERRPPYAAVFRLVGDNHRAFVHFDKLSDYLAEHPDDGKLGSEGLLSGLRVMSVDLGLRTSASISVFRVARKDELKPNSEGRVPFCFPIEGNENLVAVHERSQLLKLPGETESKDLRAIREERQRTLRQLRTQLAYLRLLVRCGSEDVGRRERSWAKLIEQPMDANQMTPDWREAFEDELQKLKSLYGICGDREWTEAVYESVRRVWRHMGKQVRDWRKDVRSGERPKIRGYQKDVVGGNSIEQIEYLERQYKFLKSWSFFGKVSGQVIRAEKGSRFAITLREHIDHAKEDRLKKLADRIIMEALGYVYALDDERGKGKWVAKYPPCQLILLEELSEYQFNNDRPPSENNQLMQWSHRGVFQELLNQAQVHDLLVGTMYAAFSSRFDARTGAPGIRCRRVPARCAREQNPEPFPWWLNKFVAEHKLDGCPLRADDLIPTGEGEFFVSPFSAEEGDFHQIHADLNAAQNLQRRLWSDFDISQIRLRCDWGEVDGEPVLIPRTTGKRTADSYGNKVFYTKTGVTYYERERGKKRRKVFAQEELSEEEAELLVEADEAREKSVVLMRDPSGIINRGDWTRQKEFWSMVNQRIEGYLVKQIRSRVRLQESACENTGDI

SEQ ID NO: 259 - protein, 1140 aa, Bacillus hisashii
  REGION 1..1140: note = MISC_FEATURE - BhCas12b polypeptide sequence
MAPKKKRKVGIHGVPAAATRSFILKIEPNEEVKKGLWKTHEVLNHGIAYYMNILKLIRQEAIYEHHEQDPKNPKKVSKAEIQAELWDFVLKMQKCNSFTHEVDKDEVFNILRELYEELVPSSVEKKGEANQLSNKFLYPLVDPNSQSGKGTASSGRKPRWYNLKIAGDPSWEEEKKKWEEDKKKDPLAKILGKLAEYGLIPLFIPYTDSNEPIVKEIKWMEKSRNQSVRRLDKDMFIQALERFLSWESWNLKVKEEYEKVEKEYKTLEERIKEDIQALKALEQYEKERQEQLLRDTLNTNEYRLSKRGLRGWREIIQKWLKMDENEPSEKYLEVFKDYQRKHPREAGDYSVYEFLSKKENHFIWRNHPEYPYLYATFCEIDKKKKDAKQQATFTLADPINHPLWVRFEERSGSNLNKYRILTEQLHTEKLKKKLTVQLDRLIYPTESGGWEEKGKVDIVLLPSRQFYNQIFLDIEEKGKHAFTYKDESIKFPLKGTLGGARVQFDRDHLRRYPHKVESGNVGRIYFNMTVNIEPTESPVSKSLKIHRDDFPKVVNFKPKELTEWIKDSKGKKLKSGIESLEIGLRVMSIDLGQRQAAAASIFEVVDQKPDIEGKLFFPIKGTELYAVHRASFNIKLPGETLVKSREVLRKAREDNLKLMNQKLNFLRNVLHFQQFEDITEREKRVTKWISRQENSDVPLVYQDELIQIRELMYKPYKDWVAFLKQLHKRLEVEIGKEVKHWRKSLSDGRKGLYGISLKNIDEIDRTRKFLLRWSLRPTEPGEVRRLEPGQRFAIDQLNHLNALKEDRLKKMANTIIMHALGYCYDVRKKKWQAKNPACQIILFEDLSNYNPYEERSRFENSKLMKWSRREIPRQVALQGEIYGLQVGEVGAQFSSRFHAKTGSPGIRCSVVTKEKLQDNRFFKNLQREGRLTLDKIAVLKEGDLYPDKGGEKFISLSKDRKCVTTHADINAAQNLQKRFWTRTHGFYKVYCKAYQVDGQTVYIPESKDQKQKIIEEFGEGYFILKDGVYEWVNAGKLKIKKGSSKQSSSELVDSDILKDSFDLASELKGEKLMLYRDPSGNVFPSDKWMAAGVFFGKLERILISKLTNQYSISTIEDDSSKQSMKRPAATKKAGQAKKKK

SEQ ID NO: 260 - protein, 1108 aa, Bacillus thermoamylovorans
  REGION 1..1108: note = MISC_FEATURE - BTCas12b.BTCas12b polypeptide sequence
MATRSFILKIEPNEEVKKGLWKTHEVLNHGIAYYMNILKLIRQEAIYEHHEQDPKNPKKVSKAEIQAELWDFVLKMQKCNSFTHEVDKDVVFNILRELYEELVPSSVEKKGEANQLSNKFLYPLVDPNSQSGKGTASSGRKPRWYNLKIAGDPSWEEEKKKWEEDKKKDPLAKILGKLAEYGLIPLFIPFTDSNEPIVKEIKWMEKSRNQSVRRLDKDMFIQALERFLSWESWNLKVKEEYEKVEKEHKTLEERIKEDIQAFKSLEQYEKERQEQLLRDTLNTNEYRLSKRGLRGWREIIQKWLKMDENEPSEKYLEVFKDYQRKHPREAGDYSVYEFLSKKENHFIWRNHPEYPYLYATFCEIDKKKKDAKQQATFTLADPINHPLWVRFEERSGSNLNKYRILTEQLHTEKLKKKLTVQLDRLIYPTESGGWEEKGKVDIVLLPSRQFYNQIFLDIEEKGKHAFTYKDESIKFPLKGTLGGARVQFDRDHLRRYPHKVESGNVGRIYFNMTVNIEPTESPVSKSLKIHRDDFPKFVNFKPKELTEWIKDSKGKKLKSGIESLEIGLRVMSIDLGQRQAAAASIFEVVDQKPDIEGKLFFPIKGTELYAVHRASFNIKLPGETLVKSREVLRKAREDNLKLMNQKLNFLRNVLHFQQFEDITEREKRVTKWISRQENSDVPLVYQDELIQIRELMYKPYKDWVAFLKQLHKRLEVEIGKEVKHWRKSLSDGRKGLYGISLKNIDEIDRTRKFLLRWSLRPTEPGEVRRLEPGQRFAIDQLNHLNALKEDRLKKMANTIIMHALGYCYDVRKKKWQAKNPACQIILFEDLSNYNPYEERSRFENSKLMKWSRREIPRQVALQGEIYGLQVGEVGAQFSSRFHAKTGSPGIRCSVVTKEKLQDNRFFKNLQREGRLTLDKIAVLKEGDLYPDKGGEKFISLSKDRKLVTTHADINAAQNLQKRFWTRTHGFYKVYCKAYQVDGQTVYIPESKDQKQKIIEEFGEGYFILKDGVYEWGNAGKLKIKKGSSKQSSSELVDSDILKDSFDLASELKGEKLMLYRDPSGNVFPSDKWMAAGVFFGKLERILISKLTNQYSISTIEDDSSKQSM

SEQ ID NO: 261 - protein, 1112 aa, Bacillus sp.
  REGION 1..1112: note = MISC_FEATURE - BvCas12b (Bacillus sp. V3-13) polypeptide sequence
  source 1..1112: note = V3-13
MAIRSIKLKMKTNSGTDSIYLRKALWRTHQLINEGIAYYMNLLTLYRQEAIGDKTKEAYQAELINIIRNQQRNNGSSEEHGSDQEILALLRQLYELIIPSSIGESGDANQLGNKFLYPLVDPNSQSGKGTSNAGRKPRWKRLKEEGNPDWELEKKKDEERKAKDPTVKIFDNLNKYGLLPLFPLFTNIQKDIEWLPLGKRQSVRKWDKDMFIQAIERLLSWESWNRRVADEYKQLKEKTESYYKEHLTGGEEWIEKIRKFEKERNMELEKNAFAPNDGYFITSRQIRGWDRVYEKWSKLPESASPEELWKVVAEQQNKMSEGFGDPKVFSFLANRENRDIWRGHSERIYHIAAYNGLQKKLSRTKEQATFTLPDAIEHPLWIRYESPGGTNLNLFKLEEKQKKNYYVTLSKIIWPSEEKWIEKENIEIPLAPSIQFNRQIKLKQHVKGKQEISFSDYSSRISLDGVLGGSRIQFNRKYIKNHKELLGEGDIGPVFFNLVVDVAPLQETRNGRLQSPIGKALKVISSDFSKVIDYKPKELMDWMNTGSASNSFGVASLLEGMRVMSIDMGQRTSASVSIFEVVKELPKDQEQKLFYSINDTELFAIHKRSFLLNLPGEVVTKNNKQQRQERRKKRQFVRSQIRMLANVLRLETKKTPDERKKAIHKLMEIVQSYDSWTASQKEVWEKELNLLTNMAAFNDEIWKESLVELHHRIEPYVGQIVSKWRKGLSEGRKNLAGISMWNIDELEDTRRLLISWSKRSRTPGEANRIETDEPFGSSLLQHIQNVKDDRLKQMANLIIMTALGFKYDKEEKDRYKRWKETYPACQIILFENLNRYLFNLDRSRRENSRLMKWAHRSIPRTVSMQGEMFGLQVGDVRSEYSSRFHAKTGAPGIRCHALTEEDLKAGSNTLKRLIEDGFINESELAYLKKGDIIPSQGGELFVTLSKRYKKDSDNNELTVIHADINAAQNLQKRFWQQNSEVYRVPCQLARMGEDKLYIPKSQTETIKKYFGKGSFVKNNTEQEVYKWEKSEKMKIKTDTTFDLQDLDGFEDISKTIELAQEQQKKYLTMFRDPSGYFFNNETWRPQKEYWSIVNNIIKSCLKKKILSNKVEL

SEQ ID NO: 262 - DNA, 47 bp, synthetic construct
  misc_feature 1..47: note = Description of artificial sequence: 5'UTR oligonucleotide sequence
  source 1..47: mol_type = other DNA
gggaaataagagagaaaagaagagtaagaagaaatataagagccacc

SEQ ID NO: 263 - DNA, 101 bp, synthetic construct
  misc_feature 1..101: note = Description of artificial sequence: 3'UTR (TriLink standard UTR) polynucleotide sequence
  source 1..101: mol_type = other DNA
gctggagcctcggtggccatgcttcttgccccttgggcctccccccagcccctcctccccttcctgcacccgtacccccgtggtctttgaataaagtctga

SEQ ID NO: 264 - DNA, 3420 bp, Bacillus hisashii
  misc_feature 1..3420: note = bhCas12b (V4) polynucleotide sequence
  source 1..3420: mol_type = other DNA
atggccccaaagaagaagcggaaggtcggtatccacggagtcccagcagccgccaccagatccttcatcctgaagatcgagcccaacgaggaagtgaagaaaggcctctggaaaacccacgaggtgctgaaccacggaatcgcctactacatgaatatcctgaagctgatccggcaagaggccatctacgagcaccacgagcaggaccccaagaatcccaagaaggtgtccaaggccgagatccaggccgagctgtgggatttcgtgctgaagatgcagaagtgcaacagcttcacacacgaggtggacaaggacgaggtgttcaacatcctgagagagctgtacgaggaactggtgcccagcagcgtggaaaagaagggcgaagccaaccagctgagcaacaagtttctgtaccctctggtggaccccaacagccagtctggaaagggaacagccagcagcggcagaaagcccagatggtacaacctgaagattgccggcgatccctcctgggaagaagagaagaagaagtgggaagaagataagaaaaaggacccgctggccaagatcctgggcaagctggctgagtacggactgatccctctgttcatcccctacaccgacagcaacgagcccatcgtgaaagaaatcaagtggatggaaaagtcccggaaccagagcgtgcggcggctggataaggacatgttcattcaggccctggaacggttcctgagctgggagagctggaacctgaaagtgaaagaggaatacgagaaggtcgagaaagagtacaagaccctggaagagaggatcaaagaggacatccaggctctgaaggctctggaacagtatgagaaagagcggcaagaacagctgctgcgggacaccctgaacaccaacgagtaccggctgagcaagagaggccttagaggctggcgggaaatcatccagaaatggctgaaaatggacgagaacgagccctccgagaagtacctggaagtgttcaaggactaccagcggaagcaccctagagaggccggcgattacagcgtgtacgagttcctgtccaagaaagagaaccacttcatctggcggaatcaccctgagtacccctacctgtacgccaccttctgcgagatcgacaagaaaaagaaggacgccaagcagcaggccaccttcacactggccgatcctatcaatcaccctctgtgggtccgattcgaggaaagaagcggcagcaacctgaacaagtacagaatcctgaccgagcagctgcacaccgagaagctgaagaaaaagctgacagtgcagctggaccggctgatctaccctacagaatctggcggctgggaagagaagggcaaagtggacattgtgctgctgcccagccggcagttctacaaccagatcttcctggacatcgaggaaaagggcaagcacgccttcacctacaaggatgagagcatcaagttccctctgaagggcacactcggcggagccagagtgcagttcgacagagatcacctgagaagataccctcacaaggtggaaagcggcaacgtgggcagaatctacttcaacatgaccgtgaacatcgagcctacagagtccccagtgtccaagtctctgaagatccaccgggacgacttccccaaggtggtcaacttcaagcccaaagaactgaccgagtggatcaaggacagcaagggcaagaaactgaagtccggcatcgagtccctggaaatcggcctgagagtgatgagcatcgacctgggacagagacaggccgctgccgcctctattttcgaggtggtggatcagaagcccgacatcgaaggcaagctgtttttcccaatcaagggcaccgagctgtatgccgtgcacagagccagcttcaacatcaagctgcccggcgagacactggtcaagagcagagaagtgctgcggaaggccagagaggacaatctgaaactgatgaaccagaagctcaacttcctgcggaacgtgctgcacttccagcagttcgaggacatcaccgagagagagaagcgggtcaccaagtggatcagcagacaagagaacagcgacgtgcccctggtgtaccaggatgagctgatccagatccgcgagctgatgtacaagccttacaaggactgggtcgccttcctgaagcagctccacaagagactggaagtcgagatcggcaaagaagtgaagcactggcggaagtccctgagcgacggaagaaagggcctgtacggcatctccctgaagaacatcgacgagatcgatcggacccggaagttcctgctgagatggtccctgaggcctaccgaacctggcgaagtgcgtagactggaacccggccagagattcgccatcgaccagctgaatcacctgaacgccctgaaagaagatcggctgaagaagatggccaacaccatcatcatgcacgccctgggctactgctacgacgtgcggaagaagaaatggcaggctaagaaccccgcctgccagatcatcctgttcgaggatctgagcaactacaacccctacgaggaaaggtcccgcttcgagaacagcaagctcatgaagtggtccagacgcgagatccccagacaggttgcactgcagggcgagatctatggcctgcaagtgggagaagtgggcgctcagttcagcagcagattccacgccaagacaggcagccctggcatcagatgtagcgtcgtgaccaaagagaagctgcaggacaatcggttcttcaagaatctgcagagagagggcagactgaccctggacaaaatcgccgtgctgaaagagggcgatctgtacccagacaaaggcggcgagaagttcatcagcctgagcaaggatcggaagtgcgtgaccacacacgccgacatcaacgccgctcagaacctgcagaagcggttctggacaagaacccacggcttctacaaggtgtactgcaaggcctaccaggtggacggccagaccgtgtacatccctgagagcaaggaccagaagcagaagatcatcgaagagttcggcgagggctacttcattctgaaggacggggtgtacgaatgggtcaacgccggcaagctgaaaatcaagaagggcagctccaagcagagcagcagcgagctggtggatagcgacatcctgaaagacagcttcgacctggcctccgagctgaaaggcgaaaagctgatgctgtacagggaccccagcggcaatgtgttccccagcgacaaatggatggccgctggcgtgttcttcggaaagctggaacgcatcctgatcagcaagctgaccaaccagtactccatcagcaccatcgaggacgacagcagcaagcagtctatgaaaaggccggcggccacgaaaaaggccggccaggcaaaaaagaaaaag

SEQ ID NO: 265 - protein, 17 aa, synthetic construct
  REGION 1..17: note = Description of artificial sequence: synthetic peptide sequence
MAPKKKRKVGIHGVPAA

SEQ ID NO: 266 - DNA, 51 bp, synthetic construct
  misc_feature 1..51: note = Description of artificial sequence: synthetic oligonucleotide sequence
  source 1..51: mol_type = other DNA
atggccccaaagaagaagcggaaggtcggtatccacggagtcccagcagcc

SEQ ID NO: 267 - protein, 1554 aa, synthetic construct
  REGION 1..1554: note = Description of artificial sequence: 101 Cas9 TadAins 1015 polypeptide sequence
MDKKYSIGLAIGTNSVGWAVITDEYKVPSKKFKVLGNTDRHSIKKNLIGALLFDSGETAEATRLKRTARRRYTRRKNRICYLQEIFSNEMAKVDDSFFHRLEESFLVEEDKKHERHPIFGNIVDEVAYHEKYPTIYHLRKKLVDSTDKADLRLIYLALAHMIKFRGHFLIEGDLNPDNSDVDKLFIQLVQTYNQLFEENPINASGVDAKAILSARLSKSRRLENLIAQLPGEKKNGLFGNLIALSLGLTPNFKSNFDLAEDAKLQLSKDTYDDDLDNLLAQIGDQYADLFLAAKNLSDAILLSDILRVNTEITKAPLSASMIKRYDEHHQDLTLLKALVRQQLPEKYKEIFFDQSKNGYAGYIDGGASQEEFYKFIKPILEKMDGTEELLVKLNREDLLRKQRTFDNGSIPHQIHLGELHAILRRQEDFYPFLKDNREKIEKILTFRIPYYVGPLARGNSRFAWMTRKSEETITPWNFEEVVDKGASAQSFIERMTNFDKNLPNEKVLPKHSLLYEYFTVYNELTKVKYVTEGMRKPAFLSGEQKKAIVDLLFKTNRKVTVKQLKEDYFKKIECFDSVEISGVEDRFNASLGTYHDLLKIIKDKDFLDNEENEDILEDIVLTLTLFEDREMIEERLKTYAHLFDDKVMKQLKRRRYTGWGRLSRKLINGIRDKQSGKTILDFLKSDGFANRNFMQLIHDDSLTFKEDIQKAQVSGQGDSLHEHIANLAGSPAIKKGILQTVKVVDELVKVMGRHKPENIVIEMARENQTTQKGQKNSRERMKRIEEGIKELGSQILKEHPVENTQLQNEKLYLYYLQNGRDMYVDQELDINRLSDYDVDHIVPQSFLKDDSIDNKVLTRSDKNRGKSDNVPSEEVVKKMKNYWRQLLNAKLITQRKFDNLTKAERGGLSELDKAGFIKRQLVETRQITKHVAQILDSRMNTKYDENDKLIREVKVITLKSKLVSDFRKDFQFYKVREINNYHHAHDAYLNAVVGTALIKKYPKLESEFVYGDYKVGSSGSETPGTSESATPESSGSEVEFSHEYWMRHALTLAKRARDEREVPVGAVLVLNNRVIGEGWNRAIGLHDPTAHAEIMALRQGGLVMQNYRLIDATLYVTFEPCVMCAGAMIHSRIGRVVFGVRNAKTGAAGSLMDVLHYPGMNHRVEITEGILADECAALLCYFFRMPRQVFNAQKKAQSSTDYDVRKMIAKSEQEIGKATAKYFFYSNIMNFFKTEITLANGEIRKRPLIETNGETGEIVWDKGRDFATVRKVLSMPQVNIVKKTEVQTGGFSKESILPKRNSDKLIARKKDWDPKKYGGFDSPTVAYSVLVVAKVEKGKSKKLKSVKELLGITIMERSSFEKNPIDFLEAKGYKEVKKDLIIKLPKYSLFELENGRKRMLASAGELQKGNELALPSKYVNFLYLASHYEKLKGSPEDNEQKQLFVEQHKHYLDEIIEQISEFSKRVILADANLDKVLSAYNKHRDKPIREQAENIIHLFTLTNLGAPAAFKYFDTTIDRKRYTSTKEVLDATLIHQSITGLYETRIDLSQLGGD

SEQ ID NO: 268 - protein, 1554 aa, synthetic construct
  REGION 1..1554: note = Description of artificial sequence: 102 Cas9 TadAins 1022 polypeptide sequence
MDKKYSIGLAIGTNSVGWAVITDEYKVPSKKFKVLGNTDRHSIKKNLIGALLFDSGETAEATRLKRTARRRYTRRKNRICYLQEIFSNEMAKVDDSFFHRLEESFLVEEDKKHERHPIFGNIVDEVAYHEKYPTIYHLRKKLVDSTDKADLRLIYLALAHMIKFRGHFLIEGDLNPDNSDVDKLFIQLVQTYNQLFEENPINASGVDAKAILSARLSKSRRLENLIAQLPGEKKNGLFGNLIALSLGLTPNFKSNFDLAEDAKLQLSKDTYDDDLDNLLAQIGDQYADLFLAAKNLSDAILLSDILRVNTEITKAPLSASMIKRYDEHHQDLTLLKALVRQQLPEKYKEIFFDQSKNGYAGYIDGGASQEEFYKFIKPILEKMDGTEELLVKLNREDLLRKQRTFDNGSIPHQIHLGELHAILRRQEDFYPFLKDNREKIEKILTFRIPYYVGPLARGNSRFAWMTRKSEETITPWNFEEVVDKGASAQSFIERMTNFDKNLPNEKVLPKHSLLYEYFTVYNELTKVKYVTEGMRKPAFLSGEQKKAIVDLLFKTNRKVTVKQLKEDYFKKIECFDSVEISGVEDRFNASLGTYHDLLKIIKDKDFLDNEENEDILEDIVLTLTLFEDREMIEERLKTYAHLFDDKVMKQLKRRRYTGWGRLSRKLINGIRDKQSGKTILDFLKSDGFANRNFMQLIHDDSLTFKEDIQKAQVSGQGDSLHEHIANLAGSPAIKKGILQTVKVVDELVKVMGRHKPENIVIEMARENQTTQKGQKNSRERMKRIEEGIKELGSQILKEHPVENTQLQNEKLYLYYLQNGRDMYVDQELDINRLSDYDVDHIVPQSFLKDDSIDNKVLTRSDKNRGKSDNVPSEEVVKKMKNYWRQLLNAKLITQRKFDNLTKAERGGLSELDKAGFIKRQLVETRQITKHVAQILDSRMNTKYDENDKLIREVKVITLKSKLVSDFRKDFQFYKVREINNYHHAHDAYLNAVVGTALIKKYPKLESEFVYGDYKVYDVRKMIGSSGSETPGTSESATPESSGSEVEFSHEYWMRHALTLAKRARDEREVPVGAVLVLNNRVIGEGWNRAIGLHDPTAHAEIMALRQGGLVMQNYRLIDATLYVTFEPCVMCAGAMIHSRIGRVVFGVRNAKTGAAGSLMDVLHYPGMNHRVEITEGILADECAALLCYFFRMPRQVFNAQKKAQSSTDAKSEQEIGKATAKYFFYSNIMNFFKTEITLANGEIRKRPLIETNGETGEIVWDKGRDFATVRKVLSMPQVNIVKKTEVQTGGFSKESILPKRNSDKLIARKKDWDPKKYGGFDSPTVAYSVLVVAKVEKGKSKKLKSVKELLGITIMERSSFEKNPIDFLEAKGYKEVKKDLIIKLPKYSLFELENGRKRMLASAGELQKGNELALPSKYVNFLYLASHYEKLKGSPEDNEQKQLFVEQHKHYLDEIIEQISEFSKRVILADANLDKVLSAYNKHRDKPIREQAENIIHLFTLTNLGAPAAFKYFDTTIDRKRYTSTKEVLDATLIHQSITGLYETRIDLSQLGGD

SEQ ID NO: 269 - protein, 1554 aa, synthetic construct
  REGION 1..1554: note = Description of artificial sequence: 103 Cas9 TadAins 1029 polypeptide sequence
MDKKYSIGLAIGTNSVGWAVITDEYKVPSKKFKVLGNTDRHSIKKNLIGALLFDSGETAEATRLKRTARRRYTRRKNRICYLQEIFSNEMAKVDDSFFHRLEESFLVEEDKKHERHPIFGNIVDEVAYHEKYPTIYHLRKKLVDSTDKADLRLIYLALAHMIKFRGHFLIEGDLNPDNSDVDKLFIQLVQTYNQLFEENPINASGVDAKAILSARLSKSRRLENLIAQLPGEKKNGLFGNLIALSLGLTPNFKSNFDLAEDAKLQLSKDTYDDDLDNLLAQIGDQYADLFLAAKNLSDAILLSDILRVNTEITKAPLSASMIKRYDEHHQDLTLLKALVRQQLPEKYKEIFFDQSKNGYAGYIDGGASQEEFYKFIKPILEKMDGTEELLVKLNREDLLRKQRTFDNGSIPHQIHLGELHAILRRQEDFYPFLKDNREKIEKILTFRIPYYVGPLARGNSRFAWMTRKSEETITPWNFEEVVDKGASAQSFIERMTNFDKNLPNEKVLPKHSLLYEYFTVYNELTKVKYVTEGMRKPAFLSGEQKKAIVDLLFKTNRKVTVKQLKEDYFKKIECFDSVEISGVEDRFNASLGTYHDLLKIIKDKDFLDNEENEDILEDIVLTLTLFEDREMIEERLKTYAHLFDDKVMKQLKRRRYTGWGRLSRKLINGIRDKQSGKTILDFLKSDGFANRNFMQLIHDDSLTFKEDIQKAQVSGQGDSLHEHIANLAGSPAIKKGILQTVKVVDELVKVMGRHKPENIVIEMARENQTTQKGQKNSRERMKRIEEGIKELGSQILKEHPVENTQLQNEKLYLYYLQNGRDMYVDQELDINRLSDYDVDHIVPQSFLKDDSIDNKVLTRSDKNRGKSDNVPSEEVVKKMKNYWRQLLNAKLITQRKFDNLTKAERGGLSELDKAGFIKRQLVETRQITKHVAQILDSRMNTKYDENDKLIREVKVITLKSKLVSDFRKDFQFYKVREINNYHHAHDAYLNAVVGTALIKKYPKLESEFVYGDYKVYDVRKMIAKSEQEIGSSGSETPGTSESATPESSGSEVEFSHEYWMRHALTLAKRARDEREVPVGAVLVLNNRVIGEGWNRAIGLHDPTAHAEIMALRQGGLVMQNYRLIDATLYVTFEPCVMCAGAMIHSRIGRVVFGVRNAKTGAAGSLMDVLHYPGMNHRVEITEGILADECAALLCYFFRMPRQVFNAQKKAQSSTDGKATAKYFFYSNIMNFFKTEITLANGEIRKRPLIETNGETGEIVWDKGRDFATVRKVLSMPQVNIVKKTEVQTGGFSKESILPKRNSDKLIARKKDWDPKKYGGFDSPTVAYSVLVVAKVEKGKSKKLKSVKELLGITIMERSSFEKNPIDFLEAKGYKEVKKDLIIKLPKYSLFELENGRKRMLASAGELQKGNELALPSKYVNFLYLASHYEKLKGSPEDNEQKQLFVEQHKHYLDEIIEQISEFSKRVILADANLDKVLSAYNKHRDKPIREQAENIIHLFTLTNLGAPAAFKYFDTTIDRKRYTSTKEVLDATLIHQSITGLYETRIDLSQLGGD

SEQ ID NO: 270 - protein, 1554 aa, synthetic construct
  REGION 1..1554: note = Description of artificial sequence: 103 Cas9 TadAins 1040 polypeptide sequence
MDKKYSIGLAIGTNSVGWAVITDEYKVPSKKFKVLGNTDRHSIKKNLIGALLFDSGETAEATRLKRTARRRYTRRKNRICYLQEIFSNEMAKVDDSFFHRLEESFLVEEDKKHERHPIFGNIVDEVAYHEKYPTIYHLRKKLVDSTDKADLRLIYLALAHMIKFRGHFLIEGDLNPDNSDVDKLFIQLVQTYNQLFEENPINASGVDAKAILSARLSKSRRLENLIAQLPGEKKNGLFGNLIALSLGLTPNFKSNFDLAEDAKLQLSKDTYDDDLDNLLAQIGDQYADLFLAAKNLSDAILLSDILRVNTEITKAPLSASMIKRYDEHHQDLTLLKALVRQQLPEKYKEIFFDQSKNGYAGYIDGGASQEEFYKFIKPILEKMDGTEELLVKLNREDLLRKQRTFDNGSIPHQIHLGELHAILRRQEDFYPFLKDNREKIEKILTFRIPYYVGPLARGNSRFAWMTRKSEETITPWNFEEVVDKGASAQSFIERMTNFDKNLPNEKVLPKHSLLYEYFTVYNELTKVKYVTEGMRKPAFLSGEQKKAIVDLLFKTNRKVTVKQLKEDYFKKIECFDSVEISGVEDRFNASLGTYHDLLKIIKDKDFLDNEENEDILEDIVLTLTLFEDREMIEERLKTYAHLFDDKVMKQLKRRRYTGWGRLSRKLINGIRDKQSGKTILDFLKSDGFANRNFMQLIHDDSLTFKEDIQKAQVSGQGDSLHEHIANLAGSPAIKKGILQTVKVVDELVKVMGRHKPENIVIEMARENQTTQKGQKNSRERMKRIEEGIKELGSQILKEHPVENTQLQNEKLYLYYLQNGRDMYVDQELDINRLSDYDVDHIVPQSFLKDDSIDNKVLTRSDKNRGKSDNVPSEEVVKKMKNYWRQLLNAKLITQRKFDNLTKAERGGLSELDKAGFIKRQLVETRQITKHVAQILDSRMNTKYDENDKLIREVKVITLKSKLVSDFRKDFQFYKVREINNYHHAHDAYLNAVVGTALIKKYPKLESEFVYGDYKVYDVRKMIAKSEQEIGKATAKYFFYSGSSGSETPGTSESATPESSGSEVEFSHEYWMRHALTLAKRARDEREVPVGAVLVLNNRVIGEGWNRAIGLHDPTAHAEIMALRQGGLVMQNYRLIDATLYVTFEPCVMCAGAMIHSRIGRVVFGVRNAKTGAAGSLMDVLHYPGMNHRVEITEGILADECAALLCYFFRMPRQVFNAQKKAQSSTDNIMNFFKTEITLANGEIRKRPLIETNGETGEIVWDKGRDFATVRKVLSMPQVNIVKKTEVQTGGFSKESILPKRNSDKLIARKKDWDPKKYGGFDSPTVAYSVLVVAKVEKGKSKKLKSVKELLGITIMERSSFEKNPIDFLEAKGYKEVKKDLIIKLPKYSLFELENGRKRMLASAGELQKGNELALPSKYVNFLYLASHYEKLKGSPEDNEQKQLFVEQHKHYLDEIIEQISEFSKRVILADANLDKVLSAYNKHRDKPIREQAENIIHLFTLTNLGAPAAFKYFDTTIDRKRYTSTKEVLDATLIHQSITGLYETRIDLSQLGGD

SEQ ID NO: 271 - protein, 1554 aa, synthetic construct
  REGION 1..1554: note = Description of artificial sequence: 105 Cas9 TadAins 1068 polypeptide sequence
MDKKYSIGLAIGTNSVGWAVITDEYKVPSKKFKVLGNTDRHSIKKNLIGALLFDSGETAEATRLKRTARRRYTRRKNRICYLQEIFSNEMAKVDDSFFHRLEESFLVEEDKKHERHPIFGNIVDEVAYHEKYPTIYHLRKKLVDSTDKADLRLIYLALAHMIKFRGHFLIEGDLNPDNSDVDKLFIQLVQTYNQLFEENPINASGVDAKAILSARLSKSRRLENLIAQLPGEKKNGLFGNLIALSLGLTPNFKSNFDLAEDAKLQLSKDTYDDDLDNLLAQIGDQYADLFLAAKNLSDAILLSDILRVNTEITKAPLSASMIKRYDEHHQDLTLLKALVRQQLPEKYKEIFFDQSKNGYAGYIDGGASQEEFYKFIKPILEKMDGTEELLVKLNREDLLRKQRTFDNGSIPHQIHLGELHAILRRQEDFYPFLKDNREKIEKILTFRIPYYVGPLARGNSRFAWMTRKSEETITPWNFEEVVDKGASAQSFIERMTNFDKNLPNEKVLPKHSLLYEYFTVYNELTKVKYVTEGMRKPAFLSGEQKKAIVDLLFKTNRKVTVKQLKEDYFKKIECFDSVEISGVEDRFNASLGTYHDLLKIIKDKDFLDNEENEDILEDIVLTLTLFEDREMIEERLKTYAHLFDDKVMKQLKRRRYTGWGRLSRKLINGIRDKQSGKTILDFLKSDGFANRNFMQLIHDDSLTFKEDIQKAQVSGQGDSLHEHIANLAGSPAIKKGILQTVKVVDELVKVMGRHKPENIVIEMARENQTTQKGQKNSRERMKRIEEGIKELGSQILKEHPVENTQLQNEKLYLYYLQNGRDMYVDQELDINRLSDYDVDHIVPQSFLKDDSIDNKVLTRSDKNRGKSDNVPSEEVVKKMKNYWRQLLNAKLITQRKFDNLTKAERGGLSELDKAGFIKRQLVETRQITKHVAQILDSRMNTKYDENDKLIREVKVITLKSKLVSDFRKDFQFYKVREINNYHHAHDAYLNAVVGTALIKKYPKLESEFVYGDYKVYDVRKMIAKSEQEIGKATAKYFFYSNIMNFFKTEITLANGEIRKRPLIETNGEGSSGSETPGTSESATPESSGSEVEFSHEYWMRHALTLAKRARDEREVPVGAVLVLNNRVIGEGWNRAIGLHDPTAHAEIMALRQGGLVMQNYRLIDATLYVTFEPCVMCAGAMIHSRIGRVVFGVRNAKTGAAGSLMDVLHYPGMNHRVEITEGILADECAALLCYFFRMPRQVFNAQKKAQSSTDTGEIVWDKGRDFATVRKVLSMPQVNIVKKTEVQTGGFSKESILPKRNSDKLIARKKDWDPKKYGGFDSPTVAYSVLVVAKVEKGKSKKLKSVKELLGITIMERSSFEKNPIDFLEAKGYKEVKKDLIIKLPKYSLFELENGRKRMLASAGELQKGNELALPSKYVNFLYLASHYEKLKGSPEDNEQKQLFVEQHKHYLDEIIEQISEFSKRVILADANLDKVLSAYNKHRDKPIREQAENIIHLFTLTNLGAPAAFKYFDTTIDRKRYTSTKEVLDATLIHQSITGLYETRIDLSQLGGD

SEQ ID NO: 272 - protein, 1554 aa, synthetic construct
  REGION 1..1554: note = Description of artificial sequence: 106 Cas9 TadAins 1247 polypeptide sequence
MDKKYSIGLAIGTNSVGWAVITDEYKVPSKKFKVLGNTDRHSIKKNLIGALLFDSGETAEATRLKRTARRRYTRRKNRICYLQEIFSNEMAKVDDSFFHRLEESFLVEEDKKHERHPIFGNIVDEVAYHEKYPTIYHLRKKLVDSTDKADLRLIYLALAHMIKFRGHFLIEGDLNPDNSDVDKLFIQLVQTYNQLFEENPINASGVDAKAILSARLSKSRRLENLIAQLPGEKKNGLFGNLIALSLGLTPNFKSNFDLAEDAKLQLSKDTYDDDLDNLLAQIGDQYADLFLAAKNLSDAILLSDILRVNTEITKAPLSASMIKRYDEHHQDLTLLKALVRQQLPEKYKEIFFDQSKNGYAGYIDGGASQEEFYKFIKPILEKMDGTEELLVKLNREDLLRKQRTFDNGSIPHQIHLGELHAILRRQEDFYPFLKDNREKIEKILTFRIPYYVGPLARGNSRFAWMTRKSEETITPWNFEEVVDKGASAQSFIERMTNFDKNLPNEKVLPKHSLLYEYFTVYNELTKVKYVTEGMRKPAFLSGEQKKAIVDLLFKTNRKVTVKQLKEDYFKKIECFDSVEISGVEDRFNASLGTYHDLLKIIKDKDFLDNEENEDILEDIVLTLTLFEDREMIEERLKTYAHLFDDKVMKQLKRRRYTGWGRLSRKLINGIRDKQSGKTILDFLKSDGFANRNFMQLIHDDSLTFKEDIQKAQVSGQGDSLHEHIANLAGSPAIKKGILQTVKVVDELVKVMGRHKPENIVIEMARENQTTQKGQKNSRERMKRIEEGIKELGSQILKEHPVENTQLQNEKLYLYYLQNGRDMYVDQELDINRLSDYDVDHIVPQSFLKDDSIDNKVLTRSDKNRGKSDNVPSEEVVKKMKNYWRQLLNAKLITQRKFDNLTKAERGGLSELDKAGFIKRQLVETRQITKHVAQILDSRMNTKYDENDKLIREVKVITLKSKLVSDFRKDFQFYKVREINNYHHAHDAYLNAVVGTALIKKYPKLESEFVYGDYKVYDVRKMIAKSEQEIGKATAKYFFYSNIMNFFKTEITLANGEIRKRPLIETNGETGEIVWDKGRDFATVRKVLSMPQVNIVKKTEVQTGGFSKESILPKRNSDKLIARKKDWDPKKYGGFDSPTVAYSVLVVAKVEKGKSKKLKSVKELLGITIMERSSFEKNPIDFLEAKGYKEVKKDLIIKLPKYSLFELENGRKRMLASAGELQKGNELALPSKYVNFLYLASHYEKLKGGSSGSETPGTSESATPESSGSEVEFSHEYWMRHALTLAKRARDEREVPVGAVLVLNNRVIGEGWNRAIGLHDPTAHAEIMALRQGGLVMQNYRLIDATLYVTFEPCVMCAGAMIHSRIGRVVFGVRNAKTGAAGSLMDVLHYPGMNHRVEITEGILADECAALLCYFFRMPRQVFNAQKKAQSSTDSPEDNEQKQLFVEQHKHYLDEIIEQISEFSKRVILADANLDKVLSAYNKHRDKPIREQAENIIHLFTLTNLGAPAAFKYFDTTIDRKRYTSTKEVLDATLIHQSITGLYETRIDLSQLGGD

SEQ ID NO: 273 - protein, 1554 aa, synthetic construct
  REGION 1..1554: note = Description of artificial sequence: 107 Cas9 TadAins 1054 polypeptide sequence
MDKKYSIGLAIGTNSVGWAVITDEYKVPSKKFKVLGNTDRHSIKKNLIGALLFDSGETAEATRLKRTARRRYTRRKNRICYLQEIFSNEMAKVDDSFFHRLEESFLVEEDKKHERHPIFGNIVDEVAYHEKYPTIYHLRKKLVDSTDKADLRLIYLALAHMIKFRGHFLIEGDLNPDNSDVDKLFIQLVQTYNQLFEENPINASGVDAKAILSARLSKSRRLENLIAQLPGEKKNGLFGNLIALSLGLTPNFKSNFDLAEDAKLQLSKDTYDDDLDNLLAQIGDQYADLFLAAKNLSDAILLSDILRVNTEITKAPLSASMIKRYDEHHQDLTLLKALVRQQLPEKYKEIFFDQSKNGYAGYIDGGASQEEFYKFIKPILEKMDGTEELLVKLNREDLLRKQRTFDNGSIPHQIHLGELHAILRRQEDFYPFLKDNREKIEKILTFRIPYYVGPLARGNSRFAWMTRKSEETITPWNFEEVVDKGASAQSFIERMTNFDKNLPNEKVLPKHSLLYEYFTVYNELTKVKYVTEGMRKPAFLSGEQKKAIVDLLFKTNRKVTVKQLKEDYFKKIECFDSVEISGVEDRFNASLGTYHDLLKIIKDKDFLDNEENEDILEDIVLTLTLFEDREMIEERLKTYAHLFDDKVMKQLKRRRYTGWGRLSRKLINGIRDKQSGKTILDFLKSDGFANRNFMQLIHDDSLTFKEDIQKAQVSGQGDSLHEHIANLAGSPAIKKGILQTVKVVDELVKVMGRHKPENIVIEMARENQTTQKGQKNSRERMKRIEEGIKELGSQILKEHPVENTQLQNEKLYLYYLQNGRDMYVDQELDINRLSDYDVDHIVPQSFLKDDSIDNKVLTRSDKNRGKSDNVPSEEVVKKMKNYWRQLLNAKLITQRKFDNLTKAERGGLSELDKAGFIKRQLVETRQITKHVAQILDSRMNTKYDENDKLIREVKVITLKSKLVSDFRKDFQFYKVREINNYHHAHDAYLNAVVGTALIKKYPKLESEFVYGDYKVYDVRKMIAKSEQEIGKATAKYFFYSNIMNFFKTEITLANGSSGSETPGTSESATPESSGSEVEFSHEYWMRHALTLAKRARDEREVPVGAVLVLNNRVIGEGWNRAIGLHDPTAHAEIMALRQGGLVMQNYRLIDATLYVTFEPCVMCAGAMIHSRIGRVVFGVRNAKTGAAGSLMDVLHYPGMNHRVEITEGILADECAALLCYFFRMPRQVFNAQKKAQSSTDGEIRKRPLIETNGETGEIVWDKGRDFATVRKVLSMPQVNIVKKTEVQTGGFSKESILPKRNSDKLIARKKDWDPKKYGGFDSPTVAYSVLVVAKVEKGKSKKLKSVKELLGITIMERSSFEKNPIDFLEAKGYKEVKKDLIIKLPKYSLFELENGRKRMLASAGELQKGNELALPSKYVNFLYLASHYEKLKGSPEDNEQKQLFVEQHKHYLDEIIEQISEFSKRVILADANLDKVLSAYNKHRDKPIREQAENIIHLFTLTNLGAPAAFKYFDTTIDRKRYTSTKEVLDATLIHQSITGLYETRIDLSQLGGD

SEQ ID NO: 274 - protein, 1554 aa, synthetic construct
  REGION 1..1554: note = Description of artificial sequence: 108 Cas9 TadAins 1026 polypeptide sequence
MDKKYSIGLAIGTNSVGWAVITDEYKVPSKKFKVLGNTDRHSIKKNLIGALLFDSGETAEATRLKRTARRRYTRRKNRICYLQEIFSNEMAKVDDSFFHRLEESFLVEEDKKHERHPIFGNIVDEVAYHEKYPTIYHLRKKLVDSTDKADLRLIYLALAHMIKFRGHFLIEGDLNPDNSDVDKLFIQLVQTYNQLFEENPINASGVDAKAILSARLSKSRRLENLIAQLPGEKKNGLFGNLIALSLGLTPNFKSNFDLAEDAKLQLSKDTYDDDLDNLLAQIGDQYADLFLAAKNLSDAILLSDILRVNTEITKAPLSASMIKRYDEHHQDLTLLKALVRQQLPEKYKEIFFDQSKNGYAGYIDGGASQEEFYKFIKPILEKMDGTEELLVKLNREDLLRKQRTFDNGSIPHQIHLGELHAILRRQEDFYPFLKDNREKIEKILTFRIPYYVGPLARGNSRFAWMTRKSEETITPWNFEEVVDKGASAQSFIERMTNFDKNLPNEKVLPKHSLLYEYFTVYNELTKVKYVTEGMRKPAFLSGEQKKAIVDLLFKTNRKVTVKQLKEDYFKKIECFDSVEISGVEDRFNASLGTYHDLLKIIKDKDFLDNEENEDILEDIVLTLTLFEDREMIEERLKTYAHLFDDKVMKQLKRRRYTGWGRLSRKLINGIRDKQSGKTILDFLKSDGFANRNFMQLIHDDSLTFKEDIQKAQVSGQGDSLHEHIANLAGSPAIKKGILQTVKVVDELVKVMGRHKPENIVIEMARENQTTQKGQKNSRERMKRIEEGIKELGSQILKEHPVENTQLQNEKLYLYYLQNGRDMYVDQELDINRLSDYDVDHIVPQSFLKDDSIDNKVLTRSDKNRGKSDNVPSEEVVKKMKNYWRQLLNAKLITQRKFDNLTKAERGGLSELDKAGFIKRQLVETRQITKHVAQILDSRMNTKYDENDKLIREVKVITLKSKLVSDFRKDFQFYKVREINNYHHAHDAYLNAVVGTALIKKYPKLESEFVYGDYKVYDVRKMIAKSEGSSGSETPGTSESATPESSGSEVEFSHEYWMRHALTLAKRARDEREVPVGAVLVLNNRVIGEGWNRAIGLHDPTAHAEIMALRQGGLVMQNYRLIDATLYVTFEPCVMCAGAMIHSRIGRVVFGVRNAKTGAAGSLMDVLHYPGMNHRVEITEGILADECAALLCYFFRMPRQVFNAQKKAQSSTDQEIGKATAKYFFYSNIMNFFKTEITLANGEIRKRPLIETNGETGEIVWDKGRDFATVRKVLSMPQVNIVKKTEVQTGGFSKESILPKRNSDKLIARKKDWDPKKYGGFDSPTVAYSVLVVAKVEKGKSKKLKSVKELLGITIMERSSFEKNPIDFLEAKGYKEVKKDLIIKLPKYSLFELENGRKRMLASAGELQKGNELALPSKYVNFLYLASHYEKLKGSPEDNEQKQLFVEQHKHYLDEIIEQISEFSKRVILADANLDKVLSAYNKHRDKPIREQAENIIHLFTLTNLGAPAAFKYFDTTIDRKRYTSTKEVLDATLIHQSITGLYETRIDLSQLGGD

SEQ ID NO: 275 - protein, 1540 aa, synthetic construct
  REGION 1..1540: note = Description of artificial sequence: 109 Cas9 TadAins 768 polypeptide sequence
MDKKYSIGLAIGTNSVGWAVITDEYKVPSKKFKVLGNTDRHSIKKNLIGALLFDSGETAEATRLKRTARRRYTRRKNRICYLQEIFSNEMAKVDDSFFHRLEESFLVEEDKKHERHPIFGNIVDEVAYHEKYPTIYHLRKKLVDSTDKADLRLIYLALAHMIKFRGHFLIEGDLNPDNSDVDKLFIQLVQTYNQLFEENPINASGVDAKAILSARLSKSRRLENLIAQLPGEKKNGLFGNLIALSLGLTPNFKSNFDLAEDAKLQLSKDTYDDDLDNLLAQIGDQYADLFLAAKNLSDAILLSDILRVNTEITKAPLSASMIKRYDEHHQDLTLLKALVRQQLPEKYKEIFFDQSKNGYAGYIDGGASQEEFYKFIKPILEKMDGTEELLVKLNREDLLRKQRTFDNGSIPHQIHLGELHAILRRQEDFYPFLKDNREKIEKILTFRIPYYVGPLARGNSRFAWMTRKSEETITPWNFEEVVDKGASAQSFIERMTNFDKNLPNEKVLPKHSLLYEYFTVYNELTKVKYVTEGMRKPAFLSGEQKKAIVDLLFKTNRKVTVKQLKEDYFKKIECFDSVEISGVEDRFNASLGTYHDLLKIIKDKDFLDNEENEDILEDIVLTLTLFEDREMIEERLKTYAHLFDDKVMKQLKRRRYTGWGRLSRKLINGIRDKQSGKTILDFLKSDGFANRNFMQLIHDDSLTFKEDIQKAQVSGQGDSLHEHIANLAGSPAIKKGILQTVKVVDELVKVMGRHKPENIVIEMARENQGSSGSETPGTSESATPESSGSEVEFSHEYWMRHALTLAKRARDEREVPVGAVLVLNNRVIGEGWNRAIGLHDPTAHAEIMALRQGGLVMQNYRLIDATLYVTFEPCVMCAGAMIHSRIGRVVFGVRNAKTGAAGSLMDVLHYPGMNHRVEITEGILADECAALLCYFFRMPRTTQKGQKNSRERMKRIEEGIKELGSQILKEHPVENTQLQNEKLYLYYLQNGRDMYVDQELDINRLSDYDVDHIVPQSFLKDDSIDNKVLTRSDKNRGKSDNVPSEEVVKKMKNYWRQLLNAKLITQRKFDNLTKAERGGLSELDKAGFIKRQLVETRQITKHVAQILDSRMNTKYDENDKLIREVKVITLKSKLVSDFRKDFQFYKVREINNYHHAHDAYLNAVVGTALIKKYPKLESEFVYGDYKVYDVRKMIAKSEQEIGKATAKYFFYSNIMNFFKTEITLANGEIRKRPLIETNGETGEIVWDKGRDFATVRKVLSMPQVNIVKKTEVQTGGFSKESILPKRNSDKLIARKKDWDPKKYGGFDSPTVAYSVLVVAKVEKGKSKKLKSVKELLGITIMERSSFEKNPIDFLEAKGYKEVKKDLIIKLPKYSLFELENGRKRMLASAGELQKGNELALPSKYVNFLYLASHYEKLKGSPEDNEQKQLFVEQHKHYLDEIIEQISEFSKRVILADANLDKVLSAYNKHRDKPIREQAENIIHLFTLTNLGAPAAFKYFDTTIDRKRYTSTKEVLDATLIHQSITGLYETRIDLSQLGGD

SEQ ID NO: 276 - protein, 1540 aa, synthetic construct
  REGION 1..1540: note = Description of artificial sequence: 110.1 Cas9 TadAins 1250 polypeptide sequence
MDKKYSIGLAIGTNSVGWAVITDEYKVPSKKFKVLGNTDRHSIKKNLIGALLFDSGETAEATRLKRTARRRYTRRKNRICYLQEIFSNEMAKVDDSFFHRLEESFLVEEDKKHERHPIFGNIVDEVAYHEKYPTIYHLRKKLVDSTDKADLRLIYLALAHMIKFRGHFLIEGDLNPDNSDVDKLFIQLVQTYNQLFEENPINASGVDAKAILSARLSKSRRLENLIAQLPGEKKNGLFGNLIALSLGLTPNFKSNFDLAEDAKLQLSKDTYDDDLDNLLAQIGDQYADLFLAAKNLSDAILLSDILRVNTEITKAPLSASMIKRYDEHHQDLTLLKALVRQQLPEKYKEIFFDQSKNGYAGYIDGGASQEEFYKFIKPILEKMDGTEELLVKLNREDLLRKQRTFDNGSIPHQIHLGELHAILRRQEDFYPFLKDNREKIEKILTFRIPYYVGPLARGNSRFAWMTRKSEETITPWNFEEVVDKGASAQSFIERMTNFDKNLPNEKVLPKHSLLYEYFTVYNELTKVKYVTEGMRKPAFLSGEQKKAIVDLLFKTNRKVTVKQLKEDYFKKIECFDSVEISGVEDRFNASLGTYHDLLKIIKDKDFLDNEENEDILEDIVLTLTLFEDREMIEERLKTYAHLFDDKVMKQLKRRRYTGWGRLSRKLINGIRDKQSGKTILDFLKSDGFANRNFMQLIHDDSLTFKEDIQKAQVSGQGDSLHEHIANLAGSPAIKKGILQTVKVVDELVKVMGRHKPENIVIEMARENQTTQKGQKNSRERMKRIEEGIKELGSQILKEHPVENTQLQNEKLYLYYLQNGRDMYVDQELDINRLSDYDVDHIVPQSFLKDDSIDNKVLTRSDKNRGKSDNVPSEEVVKKMKNYWRQLLNAKLITQRKFDNLTKAERGGLSELDKAGFIKRQLVETRQITKHVAQILDSRMNTKYDENDKLIREVKVITLKSKLVSDFRKDFQFYKVREINNYHHAHDAYLNAVVGTALIKKYPKLESEFVYGDYKVYDVRKMIAKSEQEIGKATAKYFFYSNIMNFFKTEITLANGEIRKRPLIETNGETGEIVWDKGRDFATVRKVLSMPQVNIVKKTEVQTGGFSKESILPKRNSDKLIARKKDWDPKKYGGFDSPTVAYSVLVVAKVEKGKSKKLKSVKELLGITIMERSSFEKNPIDFLEAKGYKEVKKDLIIKLPKYSLFELENGRKRMLASAGELQKGNELALPSKYVNFLYLASHYEKLKGSPGSSGSETPGTSESATPESSGSEVEFSHEYWMRHALTLAKRARDEREVPVGAVLVLNNRVIGEGWNRAIGLHDPTAHAEIMALRQGGLVMQNYRLIDATLYVTFEPCVMCAGAMIHSRIGRVVFGVRNAKTGAAGSLMDVLHYPGMNHRVEITEGILADECAALLCYFFRMPREDNEQKQLFVEQHKHYLDEIIEQISEFSKRVILADANLDKVLSAYNKHRDKPIREQAENIIHLFTLTNLGAPAAFKYFDTTIDRKRYTSTKEVLDATLIHQSITGLYETRIDLSQLGGD

SEQ ID NO: 277 - protein, 1543 aa, synthetic construct
  REGION 1..1543: note = Description of artificial sequence: 110.2 Cas9 TadAins 1250 polypeptide sequence
MDKKYSIGLAIGTNSVGWAVITDEYKVPSKKFKVLGNTDRHSIKKNLIGALLFDSGETAEATRLKRTARRRYTRRKNRICYLQEIFSNEMAKVDDSFFHRLEESFLVEEDKKHERHPIFGNIVDEVAYHEKYPTIYHLRKKLVDSTDKADLRLIYLALAHMIKFRGHFLIEGDLNPDNSDVDKLFIQLVQTYNQLFEENPINASGVDAKAILSARLSKSRRLENLIAQLPGEKKNGLFGNLIALSLGLTPNFKSNFDLAEDAKLQLSKDTYDDDLDNLLAQIGDQYADLFLAAKNLSDAILLSDILRVNTEITKAPLSASMIKRYDEHHQDLTLLKALVRQQLPEKYKEIFFDQSKNGYAGYIDGGASQEEFYKFIKPILEKMDGTEELLVKLNREDLLRKQRTFDNGSIPHQIHLGELHAILRRQEDFYPFLKDNREKIEKILTFRIPYYVGPLARGNSRFAWMTRKSEETITPWNFEEVVDKGASAQSFIERMTNFDKNLPNEKVLPKHSLLYEYFTVYNELTKVKYVTEGMRKPAFLSGEQKKAIVDLLFKTNRKVTVKQLKEDYFKKIECFDSVEISGVEDRFNASLGTYHDLLKIIKDKDFLDNEENEDILEDIVLTLTLFEDREMIEERLKTYAHLFDDKVMKQLKRRRYTGWGRLSRKLINGIRDKQSGKTILDFLKSDGFANRNFMQLIHDDSLTFKEDIQKAQVSGQGDSLHEHIANLAGSPAIKKGILQTVKVVDELVKVMGRHKPENIVIEMARENQTTQKGQKNSRERMKRIEEGIKELGSQILKEHPVENTQLQNEKLYLYYLQNGRDMYVDQELDINRLSDYDVDHIVPQSFLKDDSIDNKVLTRSDKNRGKSDNVPSEEVVKKMKNYWRQLLNAKLITQRKFDNLTKAERGGLSELDKAGFIKRQLVETRQITKHVAQILDSRMNTKYDENDKLIREVKVITLKSKLVSDFRKDFQFYKVREINNYHHAHDAYLNAVVGTALIKKYPKLESEFVYGDYKVYDVRKMIAKSEQEIGKATAKYFFYSNIMNFFKTEITLANGEIRKRPLIETNGETGEIVWDKGRDFATVRKVLSMPQVNIVKKTEVQTGGFSKESILPKRNSDKLIARKKDWDPKKYGGFDSPTVAYSVLVVAKVEKGKSKKLKSVKELLGITIMERSSFEKNPIDFLEAKGYKEVKKDLIIKLPKYSLFELENGRKRMLASAGELQKGNELALPSKYVNFLYLASHYEKLKGSPGSSGSSGSETPGTSESATPESSGSEVEFSHEYWMRHALTLAKRARDEREVPVGAVLVLNNRVIGEGWNRAIGLHDPTAHAEIMALRQGGLVMQNYRLIDATLYVTFEPCVMCAGAMIHSRIGRVVFGVRNAKTGAAGSLMDVLHYPGMNHRVEITEGILADECAALLCYFFRMPREDNEQKQLFVEQHKHYLDEIIEQISEFSKRVILADANLDKVLSAYNKHRDKPIREQAENIIHLFTLTNLGAPAAFKYFDTTIDRKRYTSTKEVLDATLIHQSITGLYETRIDLSQLGGD

SEQ ID NO: 278 - protein, 1546 aa, synthetic construct
  REGION 1..1546: note = Description of artificial sequence: 110.3 Cas9 TadAins 1250 polypeptide sequence
MDKKYSIGLAIGTNSVGWAVITDEYKVPSKKFKVLGNTDRHSIKKNLIGALLFDSGETAEATRLKRTARRRYTRRKNRICYLQEIFSNEMAKVDDSFFHRLEESFLVEEDKKHERHPIFGNIVDEVAYHEKYPTIYHLRKKLVDSTDKADLRLIYLALAHMIKFRGHFLIEGDLNPDNSDVDKLFIQLVQTYNQLFEENPINASGVDAKAILSARLSKSRRLENLIAQLPGEKKNGLFGNLIALSLGLTPNFKSNFDLAEDAKLQLSKDTYDDDLDNLLAQIGDQYADLFLAAKNLSDAILLSDILRVNTEITKAPLSASMIKRYDEHHQDLTLLKALVRQQLPEKYKEIFFDQSKNGYAGYIDGGASQEEFYKFIKPILEKMDGTEELLVKLNREDLLRKQRTFDNGSIPHQIHLGELHAILRRQEDFYPFLKDNREKIEKILTFRIPYYVGPLARGNSRFAWMTRKSEETITPWNFEEVVDKGASAQSFIERMTNFDKNLPNEKVLPKHSLLYEYFTVYNELTKVKYVTEGMRKPAFLSGEQKKAIVDLLFKTNRKVTVKQLKEDYFKKIECFDSVEISGVEDRFNASLGTYHDLLKIIKDKDFLDNEENEDILEDIVLTLTLFEDREMIEERLKTYAHLFDDKVMKQLKRRRYTGWGRLSRKLINGIRDKQSGKTILDFLKSDGFANRNFMQLIHDDSLTFKEDIQKAQVSGQGDSLHEHIANLAGSPAIKKGILQTVKVVDELVKVMGRHKPENIVIEMARENQTTQKGQKNSRERMKRIEEGIKELGSQILKEHPVENTQLQNEKLYLYYLQNGRDMYVDQELDINRLSDYDVDHIVPQSFLKDDSIDNKVLTRSDKNRGKSDNVPSEEVVKKMKNYWRQLLNAKLITQRKFDNLTKAERGGLSELDKAGFIKRQLVETRQITKHVAQILDSRMNTKYDENDKLIREVKVITLKSKLVSDFRKDFQFYKVREINNYHHAHDAYLNAVVGTALIKKYPKLESEFVYGDYKVYDVRKMIAKSEQEIGKATAKYFFYSNIMNFFKTEITLANGEIRKRPLIETNGETGEIVWDKGRDFATVRKVLSMPQVNIVKKTEVQTGGFSKESILPKRNSDKLIARKKDWDPKKYGGFDSPTVAYSVLVVAKVEKGKSKKLKSVKELLGITIMERSSFEKNPIDFLEAKGYKEVKKDLIIKLPKYSLFELENGRKRMLASAGELQKGNELALPSKYVNFLYLASHYEKLKGSPGSSGSSGSETPGTSESATPESGSSSGSEVEFSHEYWMRHALTLAKRARDEREVPVGAVLVLNNRVIGEGWNRAIGLHDPTAHAEIMALRQGGLVMQNYRLIDATLYVTFEPCVMCAGAMIHSRIGRVVFGVRNAKTGAAGSLMDVLHYPGMNHRVEITEGILADECAALLCYFFRMPREDNEQKQLFVEQHKHYLDEIIEQISEFSKRVILADANLDKVLSAYNKHRDKPIREQAENIIHLFTLTNLGAPAAFKYFDTTIDRKRYTSTKEVLDATLIHQSITGLYETRIDLSQLGGD

SEQ ID NO: 279 - protein, 1546 aa, synthetic construct
  REGION 1..1546: note = Description of artificial sequence: 110.4 Cas9 TadAins 1250 polypeptide sequence
MDKKYSIGLAIGTNSVGWAVITDEYKVPSKKFKVLGNTDRHSIKKNLIGALLFDSGETAEATRLKRTARRRYTRRKNRICYLQEIFSNEMAKVDDSFFHRLEESFLVEEDKKHERHPIFGNIVDEVAYHEKYPTIYHLRKKLVDSTDKADLRLIYLALAHMIKFRGHFLIEGDLNPDNSDVDKLFIQLVQTYNQLFEENPINASGVDAKAILSARLSKSRRLENLIAQLPGEKKNGLFGNLIALSLGLTPNFKSNFDLAEDAKLQLSKDTYDDDLDNLLAQIGDQYADLFLAAKNLSDAILLSDILRVNTEITKAPLSASMIKRYDEHHQDLTLLKALVRQQLPEKYKEIFFDQSKNGYAGYIDGGASQEEFYKFIKPILEKMDGTEELLVKLNREDLLRKQRTFDNGSIPHQIHLGELHAILRRQEDFYPFLKDNREKIEKILTFRIPYYVGPLARGNSRFAWMTRKSEETITPWNFEEVVDKGASAQSFIERMTNFDKNLPNEKVLPKHSLLYEYFTVYNELTKVKYVTEGMRKPAFLSGEQKKAIVDLLFKTNRKVTVKQLKEDYFKKIECFDSVEISGVEDRFNASLGTYHDLLKIIKDKDFLDNEENEDILEDIVLTLTLFEDREMIEERLKTYAHLFDDKVMKQLKRRRYTGWGRLSRKLINGIRDKQSGKTILDFLKSDGFANRNFMQLIHDDSLTFKEDIQKAQVSGQGDSLHEHIANLAGSPAIKKGILQTVKVVDELVKVMGRHKPENIVIEMARENQTTQKGQKNSRERMKRIEEGIKELGSQILKEHPVENTQLQNEKLYLYYLQNGRDMYVDQELDINRLSDYDVDHIVPQSFLKDDSIDNKVLTRSDKNRGKSDNVPSEEVVKKMKNYWRQLLNAKLITQRKFDNLTKAERGGLSELDKAGFIKRQLVETRQITKHVAQILDSRMNTKYDENDKLIREVKVITLKSKLVSDFRKDFQFYKVREINNYHHAHDAYLNAVVGTALIKKYPKLESEFVYGDYKVYDVRKMIAKSEQEIGKATAKYFFYSNIMNFFKTEITLANGEIRKRPLIETNGETGEIVWDKGRDFATVRKVLSMPQVNIVKKTEVQTGGFSKESILPKRNSDKLIARKKDWDPKKYGGFDSPTVAYSVLVVAKVEKGKSKKLKSVKELLGITIMERSSFEKNPIDFLEAKGYKEVKKDLIIKLPKYSLFELENGRKRMLASAGELQKGNELALPSKYVNFLYLASHYEKLKGSPGSSGSSGSETPGTSESATPESGSSSGSEVEFSHEYWMRHALTLAKRARDEREVPVGAVLVLNNRVIGEGWNRAIGLHDPTAHAEIMALRQGGLVMQNYRLIDATLYVTFEPCVMCAGAMIHSRIGRVVFGVRNAKTGAAGSLMDVLHYPGMNHRVEITEGILADECAALLCYFFRMRREDNEQKQLFVEQHKHYLDEIIEQISEFSKRVILADANLDKVLSAYNKHRDKPIREQAENIIHLFTLTNLGAPAAFKYFDTTIDRKRYTSTKEVLDATLIHQSITGLYETRIDLSQLGGD

SEQ ID NO: 280 - protein, 1546 aa, synthetic construct
  REGION 1..1546: note = Description of artificial sequence: 110.5 Cas9 TadAins 1249 polypeptide sequence
MDKKYSIGLAIGTNSVGWAVITDEYKVPSKKFKVLGNTDRHSIKKNLIGALLFDSGETAEATRLKRTARRRYTRRKNRICYLQEIFSNEMAKVDDSFFHRLEESFLVEEDKKHERHPIFGNIVDEVAYHEKYPTIYHLRKKLVDSTDKADLRLIYLALAHMIKFRGHFLIEGDLNPDNSDVDKLFIQLVQTYNQLFEENPINASGVDAKAILSARLSKSRRLENLIAQLPGEKKNGLFGNLIALSLGLTPNFKSNFDLAEDAKLQLSKDTYDDDLDNLLAQIGDQYADLFLAAKNLSDAILLSDILRVNTEITKAPLSASMIKRYDEHHQDLTLLKALVRQQLPEKYKEIFFDQSKNGYAGYIDGGASQEEFYKFIKPILEKMDGTEELLVKLNREDLLRKQRTFDNGSIPHQIHLGELHAILRRQEDFYPFLKDNREKIEKILTFRIPYYVGPLARGNSRFAWMTRKSEETITPWNFEEVVDKGASAQSFIERMTNFDKNLPNEKVLPKHSLLYEYFTVYNELTKVKYVTEGMRKPAFLSGEQKKAIVDLLFKTNRKVTVKQLKEDYFKKIECFDSVEISGVEDRFNASLGTYHDLLKIIKDKDFLDNEENEDILEDIVLTLTLFEDREMIEERLKTYAHLFDDKVMKQLKRRRYTGWGRLSRKLINGIRDKQSGKTILDFLKSDGFANRNFMQLIHDDSLTFKEDIQKAQVSGQGDSLHEHIANLAGSPAIKKGILQTVKVVDELVKVMGRHKPENIVIEMARENQTTQKGQKNSRERMKRIEEGIKELGSQILKEHPVENTQLQNEKLYLYYLQNGRDMYVDQELDINRLSDYDVDHIVPQSFLKDDSIDNKVLTRSDKNRGKSDNVPSEEVVKKMKNYWRQLLNAKLITQRKFDNLTKAERGGLSELDKAGFIKRQLVETRQITKHVAQILDSRMNTKYDENDKLIREVKVITLKSKLVSDFRKDFQFYKVREINNYHHAHDAYLNAVVGTALIKKYPKLESEFVYGDYKVYDVRKMIAKSEQEIGKATAKYFFYSNIMNFFKTEITLANGEIRKRPLIETNGETGEIVWDKGRDFATVRKVLSMPQVNIVKKTEVQTGGFSKESILPKRNSDKLIARKKDWDPKKYGGFDSPTVAYSVLVVAKVEKGKSKKLKSVKELLGITIMERSSFEKNPIDFLEAKGYKEVKKDLIIKLPKYSLFELENGRKRMLASAGELQKGNELALPSKYVNFLYLASHYEKLKGSGSSGSSGSETPGTSESATPESGSSSGSEVEFSHEYWMRHALTLAKRARDEREVPVGAVLVLNNRVIGEGWNRAIGLHDPTAHAEIMALRQGGLVMQNYRLIDATLYVTFEPCVMCAGAMIHSRIGRVVFGVRNAKTGAAGSLMDVLHYPGMNHRVEITEGILADECAALLCYFFRMRRPEDNEQKQLFVEQHKHYLDEIIEQISEFSKRVILADANLDKVLSAYNKHRDKPIREQAENIIHLFTLTNLGAPAAFKYFDTTIDRKRYTSTKEVLDATLIHQSITGLYETRIDLSQLGGD

SEQ ID NO: 281 - protein, 1551 aa, synthetic construct
  REGION 1..1551: note = Description of artificial sequence: 110.5 Cas9 TadAins delta 59-66 1250 polypeptide sequence
MDKKYSIGLAIGTNSVGWAVITDEYKVPSKKFKVLGNTDRHSIKKNLIGALLFDSGETAEATRLKRTARRRYTRRKNRICYLQEIFSNEMAKVDDSFFHRLEESFLVEEDKKHERHPIFGNIVDEVAYHEKYPTIYHLRKKLVDSTDKADLRLIYLALAHMIKFRGHFLIEGDLNPDNSDVDKLFIQLVQTYNQLFEENPINASGVDAKAILSARLSKSRRLENLIAQLPGEKKNGLFGNLIALSLGLTPNFKSNFDLAEDAKLQLSKDTYDDDLDNLLAQIGDQYADLFLAAKNLSDAILLSDILRVNTEITKAPLSASMIKRYDEHHQDLTLLKALVRQQLPEKYKEIFFDQSKNGYAGYIDGGASQEEFYKFIKPILEKMDGTEELLVKLNREDLLRKQRTFDNGSIPHQIHLGELHAILRRQEDFYPFLKDNREKIEKILTFRIPYYVGPLARGNSRFAWMTRKSEETITPWNFEEVVDKGASAQSFIERMTNFDKNLPNEKVLPKHSLLYEYFTVYNELTKVKYVTEGMRKPAFLSGEQKKAIVDLLFKTNRKVTVKQLKEDYFKKIECFDSVEISGVEDRFNASLGTYHDLLKIIKDKDFLDNEENEDILEDIVLTLTLFEDREMIEERLKTYAHLFDDKVMKQLKRRRYTGWGRLSRKLINGIRDKQSGKTILDFLKSDGFANRNFMQLIHDDSLTFKEDIQKAQVSGQGDSLHEHIANLAGSPAIKKGILQTVKVVDELVKVMGRHKPENIVIEMARENQTTQKGQKNSRERMKRIEEGIKELGSQILKEHPVENTQLQNEKLYLYYLQNGRDMYVDQELDINRLSDYDVDHIVPQSFLKDDSIDNKVLTRSDKNRGKSDNVPSEEVVKKMKNYWRQLLNAKLITQRKFDNLTKAERGGLSELDKAGFIKRQLVETRQITKHVAQILDSRMNTKYDENDKLIREVKVITLKSKLVSDFRKDFQFYKVREINNYHHAHDAYLNAVVGTALIKKYPKLESEFVYGDYKVYDVRKMIAKSEQEIGKATAKYFFYSNIMNFFKTEITLANGEIRKRPLIETNGETGEIVWDKGRDFATVRKVLSMPQVNIVKKTEVQTGGFSKESILPKRNSDKLIARKKDWDPKKYGGFDSPTVAYSVLVVAKVEKGKSKKLKSVKELLGITIMERSSFEKNPIDFLEAKGYKEVKKDLIIKLPKYSLFELENGRKRMLASAGELQKGNELALPSKYVNFLYLASHYEKLKGSPGSSGSSGSETPGTSESATPESGSSGSEVEFSHEYWMRHALTLAKRARDEREVPVGAVLVLNNRVIGEGWNRAHAEIMALRQGGLVMQNYRLIDATLYVTFEPCVMCAGAMIHSRIGRVVFGVRNAKTGAAGSLMDVLHYPGMNHRVEITEGILADECAALLCYFFRMPRQVFNAQKKAQSSTDEDNEQKQLFVEQHKHYLDEIIEQISEFSKRVILADANLDKVLSAYNKHRDKPIREQAENIIHLFTLTNLGAPAAFKYFDTTIDRKRYTSTKEVLDATLIHQSITGLYETRIDLSQLGGD

SEQ ID NO: 282 - protein, 1546 aa, synthetic construct
  REGION 1..1546: note = Description of artificial sequence: 110.6 Cas9 TadAins 1251 polypeptide sequence
MDKKYSIGLAIGTNSVGWAVITDEYKVPSKKFKVLGNTDRHSIKKNLIGALLFDSGETAEATRLKRTARRRYTRRKNRICYLQEIFSNEMAKVDDSFFHRLEESFLVEEDKKHERHPIFGNIVDEVAYHEKYPTIYHLRKKLVDSTDKADLRLIYLALAHMIKFRGHFLIEGDLNPDNSDVDKLFIQLVQTYNQLFEENPINASGVDAKAILSARLSKSRRLENLIAQLPGEKKNGLFGNLIALSLGLTPNFKSNFDLAEDAKLQLSKDTYDDDLDNLLAQIGDQYADLFLAAKNLSDAILLSDILRVNTEITKAPLSASMIKRYDEHHQDLTLLKALVRQQLPEKYKEIFFDQSKNGYAGYIDGGASQEEFYKFIKPILEKMDGTEELLVKLNREDLLRKQRTFDNGSIPHQIHLGELHAILRRQEDFYPFLKDNREKIEKILTFRIPYYVGPLARGNSRFAWMTRKSEETITPWNFEEVVDKGASAQSFIERMTNFDKNLPNEKVLPKHSLLYEYFTVYNELTKVKYVTEGMRKPAFLSGEQKKAIVDLLFKTNRKVTVKQLKEDYFKKIECFDSVEISGVEDRFNASLGTYHDLLKIIKDKDFLDNEENEDILEDIVLTLTLFEDREMIEERLKTYAHLFDDKVMKQLKRRRYTGWGRLSRKLINGIRDKQSGKTILDFLKSDGFANRNFMQLIHDDSLTFKEDIQKAQVSGQGDSLHEHIANLAGSPAIKKGILQTVKVVDELVKVMGRHKPENIVIEMARENQTTQKGQKNSRERMKRIEEGIKELGSQILKEHPVENTQLQNEKLYLYYLQNGRDMYVDQELDINRLSDYDVDHIVPQSFLKDDSIDNKVLTRSDKNRGKSDNVPSEEVVKKMKNYWRQLLNAKLITQRKFDNLTKAERGGLSELDKAGFIKRQLVETRQITKHVAQILDSRMNTKYDENDKLIREVKVITLKSKLVSDFRKDFQFYKVREINNYHHAHDAYLNAVVGTALIKKYPKLESEFVYGDYKVYDVRKMIAKSEQEIGKATAKYFFYSNIMNFFKTEITLANGEIRKRPLIETNGETGEIVWDKGRDFATVRKVLSMPQVNIVKKTEVQTGGFSKESILPKRNSDKLIARKKDWDPKKYGGFDSPTVAYSVLVVAKVEKGKSKKLKSVKELLGITIMERSSFEKNPIDFLEAKGYKEVKKDLIIKLPKYSLFELENGRKRMLASAGELQKGNELALPSKYVNFLYLASHYEKLKGSPEGSSGSSGSETPGTSESATPESGSSSGSEVEFSHEYWMRHALTLAKRARDEREVPVGAVLVLNNRVIGEGWNRAIGLHDPTAHAEIMALRQGGLVMQNYRLIDATLYVTFEPCVMCAGAMIHSRIGRVVFGVRNAKTGAAGSLMDVLHYPGMNHRVEITEGILADECAALLCYFFRMRRDNEQKQLFVEQHKHYLDEIIEQISEFSKRVILADANLDKVLSAYNKHRDKPIREQAENIIHLFTLTNLGAPAAFKYFDTTIDRKRYTSTKEVLDATLIHQSITGLYETRIDLSQLGGD

SEQ ID NO: 283 - protein, 1546 aa, synthetic construct
  REGION 1..1546: note = Description of artificial sequence: 110.7 Cas9 TadAins 1252 polypeptide sequence
MDKKYSIGLAIGTNSVGWAVITDEYKVPSKKFKVLGNTDRHSIKKNLIGALLFDSGETAEATRLKRTARRRYTRRKNRICYLQEIFSNEMAKVDDSFFHRLEESFLVEEDKKHERHPIFGNIVDEVAYHEKYPTIYHLRKKLVDSTDKADLRLIYLALAHMIKFRGHFLIEGDLNPDNSDVDKLFIQLVQTYNQLFEENPINASGVDAKAILSARLSKSRRLENLIAQLPGEKKNGLFGNLIALSLGLTPNFKSNFDLAEDAKLQLSKDTYDDDLDNLLAQIGDQYADLFLAAKNLSDAILLSDILRVNTEITKAPLSASMIKRYDEHHQDLTLLKALVRQQLPEKYKEIFFDQSKNGYAGYIDGGASQEEFYKFIKPILEKMDGTEELLVKLNREDLLRKQRTFDNGSIPHQIHLGELHAILRRQEDFYPFLKDNREKIEKILTFRIPYYVGPLARGNSRFAWMTRKSEETITPWNFEEVVDKGASAQSFIERMTNFDKNLPNEKVLPKHSLLYEYFTVYNELTKVKYVTEGMRKPAFLSGEQKKAIVDLLFKTNRKVTVKQLKEDYFKKIECFDSVEISGVEDRFNASLGTYHDLLKIIKDKDFLDNEENEDILEDIVLTLTLFEDREMIEERLKTYAHLFDDKVMKQLKRRRYTGWGRLSRKLINGIRDKQSGKTILDFLKSDGFANRNFMQLIHDDSLTFKEDIQKAQVSGQGDSLHEHIANLAGSPAIKKGILQTVKVVDELVKVMGRHKPENIVIEMARENQTTQKGQKNSRERMKRIEEGIKELGSQILKEHPVENTQLQNEKLYLYYLQNGRDMYVDQELDINRLSDYDVDHIVPQSFLKDDSIDNKVLTRSDKNRGKSDNVPSEEVVKKMKNYWRQLLNAKLITQRKFDNLTKAERGGLSELDKAGFIKRQLVETRQITKHVAQILDSRMNTKYDENDKLIREVKVITLKSKLVSDFRKDFQFYKVREINNYHHAHDAYLNAVVGTALIKKYPKLESEFVYGDYKVYDVRKMIAKSEQEIGKATAKYFFYSNIMNFFKTEITLANGEIRKRPLIETNGETGEIVWDKGRDFATVRKVLSMPQVNIVKKTEVQTGGFSKESILPKRNSDKLIARKKDWDPKKYGGFDSPTVAYSVLVVAKVEKGKSKKLKSVKELLGITIMERSSFEKNPIDFLEAKGYKEVKKDLIIKLPKYSLFELENGRKRMLASAGELQKGNELALPSKYVNFLYLASHYEKLKGSPEDGSSGSSGSETPGTSESATPESGSSSGSEVEFSHEYWMRHALTLAKRARDEREVPVGAVLVLNNRVIGEGWNRAIGLHDPTAHAEIMALRQGGLVMQNYRLIDATLYVTFEPCVMCAGAMIHSRIGRVVFGVRNAKTGAAGSLMDVLHYPGMNHRVEITEGILADECAALLCYFFRMRRNEQKQLFVEQHKHYLDEIIEQISEFSKRVILADANLDKVLSAYNKHRDKPIREQAENIIHLFTLTNLGAPAAFKYFDTTIDRKRYTSTKEVLDATLIHQSITGLYETRIDLSQLGGD

SEQ ID NO: 284 - protein, 1533 aa, synthetic construct
  REGION 1..1533: note = Description of artificial sequence: 110.8 Cas9 TadAins delta 59-66 C-truncate 1250 polypeptide sequence
MDKKYSIGLAIGTNSVGWAVITDEYKVPSKKFKVLGNTDRHSIKKNLIGALLFDSGETAEATRLKRTARRRYTRRKNRICYLQEIFSNEMAKVDDSFFHRLEESFLVEEDKKHERHPIFGNIVDEVAYHEKYPTIYHLRKKLVDSTDKADLRLIYLALAHMIKFRGHFLIEGDLNPDNSDVDKLFIQLVQTYNQLFEENPINASGVDAKAILSARLSKSRRLENLIAQLPGEKKNGLFGNLIALSLGLTPNFKSNFDLAEDAKLQLSKDTYDDDLDNLLAQIGDQYADLFLAAKNLSDAILLSDILRVNTEITKAPLSASMIKRYDEHHQDLTLLKALVRQQLPEKYKEIFFDQSKNGYAGYIDGGASQEEFYKFIKPILEKMDGTEELLVKLNREDLLRKQRTFDNGSIPHQIHLGELHAILRRQEDFYPFLKDNREKIEKILTFRIPYYVGPLARGNSRFAWMTRKSEETITPWNFEEVVDKGASAQSFIERMTNFDKNLPNEKVLPKHSLLYEYFTVYNELTKVKYVTEGMRKPAFLSGEQKKAIVDLLFKTNRKVTVKQLKEDYFKKIECFDSVEISGVEDRFNASLGTYHDLLKIIKDKDFLDNEENEDILEDIVLTLTLFEDREMIEERLKTYAHLFDDKVMKQLKRRRYTGWGRLSRKLINGIRDKQSGKTILDFLKSDGFANRNFMQLIHDDSLTFKEDIQKAQVSGQGDSLHEHIANLAGSPAIKKGILQTVKVVDELVKVMGRHKPENIVIEMARENQTTQKGQKNSRERMKRIEEGIKELGSQILKEHPVENTQLQNEKLYLYYLQNGRDMYVDQELDINRLSDYDVDHIVPQSFLKDDSIDNKVLTRSDKNRGKSDNVPSEEVVKKMKNYWRQLLNAKLITQRKFDNLTKAERGGLSELDKAGFIKRQLVETRQITKHVAQILDSRMNTKYDENDKLIREVKVITLKSKLVSDFRKDFQFYKVREINNYHHAHDAYLNAVVGTALIKKYPKLESEFVYGDYKVYDVRKMIAKSEQEIGKATAKYFFYSNIMNFFKTEITLANGEIRKRPLIETNGETGEIVWDKGRDFATVRKVLSMPQVNIVKKTEVQTGGFSKESILPKRNSDKLIARKKDWDPKKYGGFDSPTVAYSVLVVAKVEKGKSKKLKSVKELLGITIMERSSFEKNPIDFLEAKGYKEVKKDLIIKLPKYSLFELENGRKRMLASAGELQKGNELALPSKYVNFLYLASHYEKLKGSPGSSGSETPGTSESATPESSGSEVEFSHEYWMRHALTLAKRARDEREVPVGAVLVLNNRVIGEGWNRAHAEIMALRQGGLVMQNYRLIDATLYVTFEPCVMCAGAMIHSRIGRVVFGVRNAKTGAAGSLMDVLHYPGMNHRVEITEGILADECAALLCYFFRMPRQEDNEQKQLFVEQHKHYLDEIIEQISEFSKRVILADANLDKVLSAYNKHRDKPIREQAENIIHLFTLTNLGAPAAFKYFDTTIDRKRYTSTKEVLDATLIHQSITGLYETRIDLSQLGGD

SEQ ID NO: 285 - protein, 1549 aa, synthetic construct
  REGION 1..1549: note = Description of artificial sequence: 111.1 Cas9 TadAins 997 polypeptide sequence
MDKKYSIGLAIGTNSVGWAVITDEYKVPSKKFKVLGNTDRHSIKKNLIGALLFDSGETAEATRLKRTARRRYTRRKNRICYLQEIFSNEMAKVDDSFFHRLEESFLVEEDKKHERHPIFGNIVDEVAYHEKYPTIYHLRKKLVDSTDKADLRLIYLALAHMIKFRGHFLIEGDLNPDNSDVDKLFIQLVQTYNQLFEENPINASGVDAKAILSARLSKSRRLENLIAQLPGEKKNGLFGNLIALSLGLTPNFKSNFDLAEDAKLQLSKDTYDDDLDNLLAQIGDQYADLFLAAKNLSDAILLSDILRVNTEITKAPLSASMIKRYDEHHQDLTLLKALVRQQLPEKYKEIFFDQSKNGYAGYIDGGASQEEFYKFIKPILEKMDGTEELLVKLNREDLLRKQRTFDNGSIPHQIHLGELHAILRRQEDFYPFLKDNREKIEKILTFRIPYYVGPLARGNSRFAWMTRKSEETITPWNFEEVVDKGASAQSFIERMTNFDKNLPNEKVLPKHSLLYEYFTVYNELTKVKYVTEGMRKPAFLSGEQKKAIVDLLFKTNRKVTVKQLKEDYFKKIECFDSVEISGVEDRFNASLGTYHDLLKIIKDKDFLDNEENEDILEDIVLTLTLFEDREMIEERLKTYAHLFDDKVMKQLKRRRYTGWGRLSRKLINGIRDKQSGKTILDFLKSDGFANRNFMQLIHDDSLTFKEDIQKAQVSGQGDSLHEHIANLAGSPAIKKGILQTVKVVDELVKVMGRHKPENIVIEMARENQTTQKGQKNSRERMKRIEEGIKELGSQILKEHPVENTQLQNEKLYLYYLQNGRDMYVDQELDINRLSDYDVDHIVPQSFLKDDSIDNKVLTRSDKNRGKSDNVPSEEVVKKMKNYWRQLLNAKLITQRKFDNLTKAERGGLSELDKAGFIKRQLVETRQITKHVAQILDSRMNTKYDENDKLIREVKVITLKSKLVSDFRKDFQFYKVREINNYHHAHDAYLNAVVGTALSHEYWMRHALTLAKRARDEREVPVGAVLVLNNRVIGEGWNRAIGLHDPTAHAEIMALRQGGLVMQNYRLIDATLYVTFEPCVMCAGAMIHSRIGRVVFGVRNAKTGAAGSLMDVLHYPGMNHRVEITEGILADECAALLCYFFRMPRQVFNAQKKAQSSTDGSSGSETPGTSESATPESSGIKKYPKLESEFVYGDYKVYDVRKMIAKSEQEIGKATAKYFFYSNIMNFFKTEITLANGEIRKRPLIETNGETGEIVWDKGRDFATVRKVLSMPQVNIVKKTEVQTGGFSKESILPKRNSDKLIARKKDWDPKKYGGFDSPTVAYSVLVVAKVEKGKSKKLKSVKELLGITIMERSSFEKNPIDFLEAKGYKEVKKDLIIKLPKYSLFELENGRKRMLASAGELQKGNELALPSKYVNFLYLASHYEKLKGSPEDNEQKQLFVEQHKHYLDEIIEQISEFSKRVILADANLDKVLSAYNKHRDKPIREQAENIIHLFTLTNLGAPAAFKYFDTTIDRKRYTSTKEVLDATLIHQSITGLYETRIDLSQLGGD

SEQ ID NO: 286 - protein, 1555 aa, synthetic construct
  REGION 1..1555: note = Description of artificial sequence: 111.2 Cas9 TadAins 997 polypeptide sequence
MDKKYSIGLAIGTNSVGWAVITDEYKVPSKKFKVLGNTDRHSIKKNLIGALLFDSGETAEATRLKRTARRRYTRRKNRICYLQEIFSNEMAKVDDSFFHRLEESFLVEEDKKHERHPIFGNIVDEVAYHEKYPTIYHLRKKLVDSTDKADLRLIYLALAHMIKFRGHFLIEGDLNPDNSDVDKLFIQLVQTYNQLFEENPINASGVDAKAILSARLSKSRRLENLIAQLPGEKKNGLFGNLIALSLGLTPNFKSNFDLAEDAKLQLSKDTYDDDLDNLLAQIGDQYADLFLAAKNLSDAILLSDILRVNTEITKAPLSASMIKRYDEHHQDLTLLKALVRQQLPEKYKEIFFDQSKNGYAGYIDGGASQEEFYKFIKPILEKMDGTEELLVKLNREDLLRKQRTFDNGSIPHQIHLGELHAILRRQEDFYPFLKDNREKIEKILTFRIPYYVGPLARGNSRFAWMTRKSEETITPWNFEEVVDKGASAQSFIERMTNFDKNLPNEKVLPKHSLLYEYFTVYNELTKVKYVTEGMRKPAFLSGEQKKAIVDLLFKTNRKVTVKQLKEDYFKKIECFDSVEISGVEDRFNASLGTYHDLLKIIKDKDFLDNEENEDILEDIVLTLTLFEDREMIEERLKTYAHLFDDKVMKQLKRRRYTGWGRLSRKLINGIRDKQSGKTILDFLKSDGFANRNFMQLIHDDSLTFKEDIQKAQVSGQGDSLHEHIANLAGSPAIKKGILQTVKVVDELVKVMGRHKPENIVIEMARENQTTQKGQKNSRERMKRIEEGIKELGSQILKEHPVENTQLQNEKLYLYYLQNGRDMYVDQELDINRLSDYDVDHIVPQSFLKDDSIDNKVLTRSDKNRGKSDNVPSEEVVKKMKNYWRQLLNAKLITQRKFDNLTKAERGGLSELDKAGFIKRQLVETRQITKHVAQILDSRMNTKYDENDKLIREVKVITLKSKLVSDFRKDFQFYKVREINNYHHAHDAYLNAVVGTALSHEYWMRHALTLAKRARDEREVPVGAVLVLNNRVIGEGWNRAIGLHDPTAHAEIMALRQGGLVMQNYRLIDATLYVTFEPCVMCAGAMIHSRIGRVVFGVRNAKTGAAGSLMDVLHYPGMNHRVEITEGILADECAALLCYFFRMPRQVFNAQKKAQSSTDGSSGSSGSETPGTSESATPESSGGSSIKKYPKLESEFVYGDYKVYDVRKMIAKSEQEIGKATAKYFFYSNIMNFFKTEITLANGEIRKRPLIETNGETGEIVWDKGRDFATVRKVLSMPQVNIVKKTEVQTGGFSKESILPKRNSDKLIARKKDWDPKKYGGFDSPTVAYSVLVVAKVEKGKSKKLKSVKELLGITIMERSSFEKNPIDFLEAKGYKEVKKDLIIKLPKYSLFELENGRKRMLASAGELQKGNELALPSKYVNFLYLASHYEKLKGSPEDNEQKQLFVEQHKHYLDEIIEQISEFSKRVILADANLDKVLSAYNKHRDKPIREQAENIIHLFTLTNLGAPAAFKYFDTTIDRKRYTSTKEVLDATLIHQSITGLYETRIDLSQLGGD

SEQ ID NO: 287 - protein, 1421 aa, synthetic construct
  REGION 1..1421: note = Description of artificial sequence: 112 delta HNH TadA polypeptide sequence
MDKKYSIGLAIGTNSVGWAVITDEYKVPSKKFKVLGNTDRHSIKKNLIGALLFDSGETAEATRLKRTARRRYTRRKNRICYLQEIFSNEMAKVDDSFFHRLEESFLVEEDKKHERHPIFGNIVDEVAYHEKYPTIYHLRKKLVDSTDKADLRLIYLALAHMIKFRGHFLIEGDLNPDNSDVDKLFIQLVQTYNQLFEENPINASGVDAKAILSARLSKSRRLENLIAQLPGEKKNGLFGNLIALSLGLTPNFKSNFDLAEDAKLQLSKDTYDDDLDNLLAQIGDQYADLFLAAKNLSDAILLSDILRVNTEITKAPLSASMIKRYDEHHQDLTLLKALVRQQLPEKYKEIFFDQSKNGYAGYIDGGASQEEFYKFIKPILEKMDGTEELLVKLNREDLLRKQRTFDNGSIPHQIHLGELHAILRRQEDFYPFLKDNREKIEKILTFRIPYYVGPLARGNSRFAWMTRKSEETITPWNFEEVVDKGASAQSFIERMTNFDKNLPNEKVLPKHSLLYEYFTVYNELTKVKYVTEGMRKPAFLSGEQKKAIVDLLFKTNRKVTVKQLKEDYFKKIECFDSVEISGVEDRFNASLGTYHDLLKIIKDKDFLDNEENEDILEDIVLTLTLFEDREMIEERLKTYAHLFDDKVMKQLKRRRYTGWGRLSRKLINGIRDKQSGKTILDFLKSDGFANRNFMQLIHDDSLTFKEDIQKAQVSGQGDSLHEHIANLAGSPAIKKGILQTVKVVDELVKVMGRHKPENIVIEMARENQTTQKGQKNSRERMKRIEEGIKELGSEVEFSHEYWMRHALTLAKRARDEREVPVGAVLVLNNRVIGEGWNRAIGLHDPTAHAEIMALRQGGLVMQNYRLIDATLYVTFEPCVMCAGAMIHSRIGRVVFGVRNAKTGAAGSLMDVLHYPGMNHRVEITEGILADECAALLCYFFRMPRQVFNAQKKAQSSTDGGLSELDKAGFIKRQLVETRQITKHVAQILDSRMNTKYDENDKLIREVKVITLKSKLVSDFRKDFQFYKVREINNYHHAHDAYLNAVVGTALIKKYPKLESEFVYGDYKVYDVRKMIAKSEQEIGKATAKYFFYSNIMNFFKTEITLANGEIRKRPLIETNGETGEIVWDKGRDFATVRKVLSMPQVNIVKKTEVQTGGFSKESILPKRNSDKLIARKKDWDPKKYGGFDSPTVAYSVLVVAKVEKGKSKKLKSVKELLGITIMERSSFEKNPIDFLEAKGYKEVKKDLIIKLPKYSLFELENGRKRMLASAGELQKGNELALPSKYVNFLYLASHYEKLKGSPEDNEQKQLFVEQHKHYLDEIIEQISEFSKRVILADANLDKVLSAYNKHRDKPIREQAENIIHLFTLTNLGAPAAFKYFDTTIDRKRYTSTKEVLDATLIHQSITGLYETRIDLSQLGGD

SEQ ID NO: 288 - protein, 1552 aa, synthetic construct
  REGION 1..1552: note = Description of artificial sequence: 113 N-term single TadA helix trunc 165-end polypeptide sequence
MSEVEFSHEYWMRHALTLAKRARDEREVPVGAVLVLNNRVIGEGWNRAIGLHDPTAHAEIMALRQGGLVMQNYRLIDATLYVTFEPCVMCAGAMIHSRIGRVVFGVRNAKTGAAGSLMDVLHYPGMNHRVEITEGILADECAALLCYFFRMPRSGGSSGGSSGSETPGTSESATPESSGGSSGGSDKKYSIGLAIGTNSVGWAVITDEYKVPSKKFKVLGNTDRHSIKKNLIGALLFDSGETAEATRLKRTARRRYTRRKNRICYLQEIFSNEMAKVDDSFFHRLEESFLVEEDKKHERHPIFGNIVDEVAYHEKYPTIYHLRKKLVDSTDKADLRLIYLALAHMIKFRGHFLIEGDLNPDNSDVDKLFIQLVQTYNQLFEENPINASGVDAKAILSARLSKSRRLENLIAQLPGEKKNGLFGNLIALSLGLTPNFKSNFDLAEDAKLQLSKDTYDDDLDNLLAQIGDQYADLFLAAKNLSDAILLSDILRVNTEITKAPLSASMIKRYDEHHQDLTLLKALVRQQLPEKYKEIFFDQSKNGYAGYIDGGASQEEFYKFIKPILEKMDGTEELLVKLNREDLLRKQRTFDNGSIPHQIHLGELHAILRRQEDFYPFLKDNREKIEKILTFRIPYYVGPLARGNSRFAWMTRKSEETITPWNFEEVVDKGASAQSFIERMTNFDKNLPNEKVLPKHSLLYEYFTVYNELTKVKYVTEGMRKPAFLSGEQKKAIVDLLFKTNRKVTVKQLKEDYFKKIECFDSVEISGVEDRFNASLGTYHDLLKIIKDKDFLDNEENEDILEDIVLTLTLFEDREMIEERLKTYAHLFDDKVMKQLKRRRYTGWGRLSRKLINGIRDKQSGKTILDFLKSDGFANRNFMQLIHDDSLTFKEDIQKAQVSGQGDSLHEHIANLAGSPAIKKGILQTVKVVDELVKVMGRHKPENIVIEMARENQTTQKGQKNSRERMKRIEEGIKELGSQILKEHPVENTQLQNEKLYLYYLQNGRDMYVDQELDINRLSDYDVDHIVPQSFLKDDSIDNKVLTRSDKNRGKSDNVPSEEVVKKMKNYWRQLLNAKLITQRKFDNLTKAERGGLSELDKAGFIKRQLVETRQITKHVAQILDSRMNTKYDENDKLIREVKVITLKSKLVSDFRKDFQFYKVREINNYHHAHDAYLNAVVGTALIKKYPKLESEFVYGDYKVYDVRKMIAKSEQEIGKATAKYFFYSNIMNFFKTEITLANGEIRKRPLIETNGETGEIVWDKGRDFATVRKVLSMPQVNIVKKTEVQTGGFSKESILPKRNSDKLIARKKDWDPKKYGGFDSPTVAYSVLVVAKVEKGKSKKLKSVKELLGITIMERSSFEKNPIDFLEAKGYKEVKKDLIIKLPKYSLFELENGRKRMLASAGELQKGNELALPSKYVNFLYLASHYEKLKGSPEDNEQKQLFVEQHKHYLDEIIEQISEFSKRVILADANLDKVLSAYNKHRDKPIREQAENIIHLFTLTNLGAPAAFKYFDTTIDRKRYTSTKEVLDATLIHQSITGLYETRIDLSQLGGD

SEQ ID NO: 289 - protein, 1545 aa, synthetic construct
  REGION 1..1545: note = Description of artificial sequence: 114 N-term single TadA helix trunc 165-end delta 59-65 polypeptide sequence
MSEVEFSHEYWMRHALTLAKRARDEREVPVGAVLVLNNRVIGEGWNRTAHAEIMALRQGGLVMQNYRLIDATLYVTFEPCVMCAGAMIHSRIGRVVFGVRNAKTGAAGSLMDVLHYPGMNHRVEITEGILADECAALLCYFFRMPRSGGSSGGSSGSETPGTSESATPESSGGSSGGSDKKYSIGLAIGTNSVGWAVITDEYKVPSKKFKVLGNTDRHSIKKNLIGALLFDSGETAEATRLKRTARRRYTRRKNRICYLQEIFSNEMAKVDDSFFHRLEESFLVEEDKKHERHPIFGNIVDEVAYHEKYPTIYHLRKKLVDSTDKADLRLIYLALAHMIKFRGHFLIEGDLNPDNSDVDKLFIQLVQTYNQLFEENPINASGVDAKAILSARLSKSRRLENLIAQLPGEKKNGLFGNLIALSLGLTPNFKSNFDLAEDAKLQLSKDTYDDDLDNLLAQIGDQYADLFLAAKNLSDAILLSDILRVNTEITKAPLSASMIKRYDEHHQDLTLLKALVRQQLPEKYKEIFFDQSKNGYAGYIDGGASQEEFYKFIKPILEKMDGTEELLVKLNREDLLRKQRTFDNGSIPHQIHLGELHAILRRQEDFYPFLKDNREKIEKILTFRIPYYVGPLARGNSRFAWMTRKSEETITPWNFEEVVDKGASAQSFIERMTNFDKNLPNEKVLPKHSLLYEYFTVYNELTKVKYVTEGMRKPAFLSGEQKKAIVDLLFKTNRKVTVKQLKEDYFKKIECFDSVEISGVEDRFNASLGTYHDLLKIIKDKDFLDNEENEDILEDIVLTLTLFEDREMIEERLKTYAHLFDDKVMKQLKRRRYTGWGRLSRKLINGIRDKQSGKTILDFLKSDGFANRNFMQLIHDDSLTFKEDIQKAQVSGQGDSLHEHIANLAGSPAIKKGILQTVKVVDELVKVMGRHKPENIVIEMARENQTTQKGQKNSRERMKRIEEGIKELGSQILKEHPVENTQLQNEKLYLYYLQNGRDMYVDQELDINRLSDYDVDHIVPQSFLKDDSIDNKVLTRSDKNRGKSDNVPSEEVVKKMKNYWRQLLNAKLITQRKFDNLTKAERGGLSELDKAGFIKRQLVETRQITKHVAQILDSRMNTKYDENDKLIREVKVITLKSKLVSDFRKDFQFYKVREINNYHHAHDAYLNAVVGTALIKKYPKLESEFVYGDYKVYDVRKMIAKSEQEIGKATAKYFFYSNIMNFFKTEITLANGEIRKRPLIETNGETGEIVWDKGRDFATVRKVLSMPQVNIVKKTEVQTGGFSKESILPKRNSDKLIARKKDWDPKKYGGFDSPTVAYSVLVVAKVEKGKSKKLKSVKELLGITIMERSSFEKNPIDFLEAKGYKEVKKDLIIKLPKYSLFELENGRKRMLASAGELQKGNELALPSKYVNFLYLASHYEKLKGSPEDNEQKQLFVEQHKHYLDEIIEQISEFSKRVILADANLDKVLSAYNKHRDKPIREQAENIIHLFTLTNLGAPAAFKYFDTTIDRKRYTSTKEVLDATLIHQSITGLYETRIDLSQLGGD

SEQ ID NO: 290 - protein, 1541 aa, synthetic construct
  REGION 1..1541: note = Description of artificial sequence: 115.1 Cas9 TadAins1004 polypeptide sequence
MDKKYSIGLAIGTNSVGWAVITDEYKVPSKKFKVLGNTDRHSIKKNLIGALLFDSGETAEATRLKRTARRRYTRRKNRICYLQEIFSNEMAKVDDSFFHRLEESFLVEEDKKHERHPIFGNIVDEVAYHEKYPTIYHLRKKLVDSTDKADLRLIYLALAHMIKFRGHFLIEGDLNPDNSDVDKLFIQLVQTYNQLFEENPINASGVDAKAILSARLSKSRRLENLIAQLPGEKKNGLFGNLIALSLGLTPNFKSNFDLAEDAKLQLSKDTYDDDLDNLLAQIGDQYADLFLAAKNLSDAILLSDILRVNTEITKAPLSASMIKRYDEHHQDLTLLKALVRQQLPEKYKEIFFDQSKNGYAGYIDGGASQEEFYKFIKPILEKMDGTEELLVKLNREDLLRKQRTFDNGSIPHQIHLGELHAILRRQEDFYPFLKDNREKIEKILTFRIPYYVGPLARGNSRFAWMTRKSEETITPWNFEEVVDKGASAQSFIERMTNFDKNLPNEKVLPKHSLLYEYFTVYNELTKVKYVTEGMRKPAFLSGEQKKAIVDLLFKTNRKVTVKQLKEDYFKKIECFDSVEISGVEDRFNASLGTYHDLLKIIKDKDFLDNEENEDILEDIVLTLTLFEDREMIEERLKTYAHLFDDKVMKQLKRRRYTGWGRLSRKLINGIRDKQSGKTILDFLKSDGFANRNFMQLIHDDSLTFKEDIQKAQVSGQGDSLHEHIANLAGSPAIKKGILQTVKVVDELVKVMGRHKPENIVIEMARENQTTQKGQKNSRERMKRIEEGIKELGSQILKEHPVENTQLQNEKLYLYYLQNGRDMYVDQELDINRLSDYDVDHIVPQSFLKDDSIDNKVLTRSDKNRGKSDNVPSEEVVKKMKNYWRQLLNAKLITQRKFDNLTKAERGGLSELDKAGFIKRQLVETRQITKHVAQILDSRMNTKYDENDKLIREVKVITLKSKLVSDFRKDFQFYKVREINNYHHAHDAYLNAVVGTALIKKYPKGSSGSETPGTSESATPESSGSEVEFSHEYWMRHALTLAKRARDEREVPVGAVLVLNNRVIGEGWNRAIGLHDPTAHAEIMALRQGGLVMQNYRLIDATLYVTFEPCVMCAGAMIHSRIGRVVFGVRNAKTGAAGSLMDVLHYPGMNHRVEITEGILADECAALLCYFFRMPRQLESEFVYGDYKVYDVRKMIAKSEQEIGKATAKYFFYSNIMNFFKTEITLANGEIRKRPLIETNGETGEIVWDKGRDFATVRKVLSMPQVNIVKKTEVQTGGFSKESILPKRNSDKLIARKKDWDPKKYGGFDSPTVAYSVLVVAKVEKGKSKKLKSVKELLGITIMERSSFEKNPIDFLEAKGYKEVKKDLIIKLPKYSLFELENGRKRMLASAGELQKGNELALPSKYVNFLYLASHYEKLKGSPEDNEQKQLFVEQHKHYLDEIIEQISEFSKRVILADANLDKVLSAYNKHRDKPIREQAENIIHLFTLTNLGAPAAFKYFDTTIDRKRYTSTKEVLDATLIHQSITGLYETRIDLSQLGGD

SEQ ID NO: 291 - protein, 1541 aa, synthetic construct
  REGION 1..1541: note = Description of artificial sequence: 115.2 Cas9 TadAins1005 polypeptide sequence
MDKKYSIGLAIGTNSVGWAVITDEYKVPSKKFKVLGNTDRHSIKKNLIGALLFDSGETAEATRLKRTARRRYTRRKNRICYLQEIFSNEMAKVDDSFFHRLEESFLVEEDKKHERHPIFGNIVDEVAYHEKYPTIYHLRKKLVDSTDKADLRLIYLALAHMIKFRGHFLIEGDLNPDNSDVDKLFIQLVQTYNQLFEENPINASGVDAKAILSARLSKSRRLENLIAQLPGEKKNGLFGNLIALSLGLTPNFKSNFDLAEDAKLQLSKDTYDDDLDNLLAQIGDQYADLFLAAKNLSDAILLSDILRVNTEITKAPLSASMIKRYDEHHQDLTLLKALVRQQLPEKYKEIFFDQSKNGYAGYIDGGASQEEFYKFIKPILEKMDGTEELLVKLNREDLLRKQRTFDNGSIPHQIHLGELHAILRRQEDFYPFLKDNREKIEKILTFRIPYYVGPLARGNSRFAWMTRKSEETITPWNFEEVVDKGASAQSFIERMTNFDKNLPNEKVLPKHSLLYEYFTVYNELTKVKYVTEGMRKPAFLSGEQKKAIVDLLFKTNRKVTVKQLKEDYFKKIECFDSVEISGVEDRFNASLGTYHDLLKIIKDKDFLDNEENEDILEDIVLTLTLFEDREMIEERLKTYAHLFDDKVMKQLKRRRYTGWGRLSRKLINGIRDKQSGKTILDFLKSDGFANRNFMQLIHDDSLTFKEDIQKAQVSGQGDSLHEHIANLAGSPAIKKGILQTVKVVDELVKVMGRHKPENIVIEMARENQTTQKGQKNSRERMKRIEEGIKELGSQILKEHPVENTQLQNEKLYLYYLQNGRDMYVDQELDINRLSDYDVDHIVPQSFLKDDSIDNKVLTRSDKNRGKSDNVPSEEVVKKMKNYWRQLLNAKLITQRKFDNLTKAERGGLSELDKAGFIKRQLVETRQITKHVAQILDSRMNTKYDENDKLIREVKVITLKSKLVSDFRKDFQFYKVREINNYHHAHDAYLNAVVGTALIKKYPKLGSSGSETPGTSESATPESSGSEVEFSHEYWMRHALTLAKRARDEREVPVGAVLVLNNRVIGEGWNRAIGLHDPTAHAEIMALRQGGLVMQNYRLIDATLYVTFEPCVMCAGAMIHSRIGRVVFGVRNAKTGAAGSLMDVLHYPGMNHRVEITEGILADECAALLCYFFRMPRQESEFVYGDYKVYDVRKMIAKSEQEIGKATAKYFFYSNIMNFFKTEITLANGEIRKRPLIETNGETGEIVWDKGRDFATVRKVLSMPQVNIVKKTEVQTGGFSKESILPKRNSDKLIARKKDWDPKKYGGFDSPTVAYSVLVVAKVEKGKSKKLKSVKELLGITIMERSSFEKNPIDFLEAKGYKEVKKDLIIKLPKYSLFELENGRKRMLASAGELQKGNELALPSKYVNFLYLASHYEKLKGSPEDNEQKQLFVEQHKHYLDEIIEQISEFSKRVILADANLDKVLSAYNKHRDKPIREQAENIIHLFTLTNLGAPAAFKYFDTTIDRKRYTSTKEVLDATLIHQSITGLYETRIDLSQLGGD

SEQ ID NO: 292 - protein, 1541 aa, synthetic construct
  REGION 1..1541: note = Description of artificial sequence: 115.3 Cas9 TadAins1006 polypeptide sequence
MDKKYSIGLAIGTNSVGWAVITDEYKVPSKKFKVLGNTDRHSIKKNLIGALLFDSGETAEATRLKRTARRRYTRRKNRICYLQEIFSNEMAKVDDSFFHRLEESFLVEEDKKHERHPIFGNIVDEVAYHEKYPTIYHLRKKLVDSTDKADLRLIYLALAHMIKFRGHFLIEGDLNPDNSDVDKLFIQLVQTYNQLFEENPINASGVDAKAILSARLSKSRRLENLIAQLPGEKKNGLFGNLIALSLGLTPNFKSNFDLAEDAKLQLSKDTYDDDLDNLLAQIGDQYADLFLAAKNLSDAILLSDILRVNTEITKAPLSASMIKRYDEHHQDLTLLKALVRQQLPEKYKEIFFDQSKNGYAGYIDGGASQEEFYKFIKPILEKMDGTEELLVKLNREDLLRKQRTFDNGSIPHQIHLGELHAILRRQEDFYPFLKDNREKIEKILTFRIPYYVGPLARGNSRFAWMTRKSEETITPWNFEEVVDKGASAQSFIERMTNFDKNLPNEKVLPKHSLLYEYFTVYNELTKVKYVTEGMRKPAFLSGEQKKAIVDLLFKTNRKVTVKQLKEDYFKKIECFDSVEISGVEDRFNASLGTYHDLLKIIKDKDFLDNEENEDILEDIVLTLTLFEDREMIEERLKTYAHLFDDKVMKQLKRRRYTGWGRLSRKLINGIRDKQSGKTILDFLKSDGFANRNFMQLIHDDSLTFKEDIQKAQVSGQGDSLHEHIANLAGSPAIKKGILQTVKVVDELVKVMGRHKPENIVIEMARENQTTQKGQKNSRERMKRIEEGIKELGSQILKEHPVENTQLQNEKLYLYYLQNGRDMYVDQELDINRLSDYDVDHIVPQSFLKDDSIDNKVLTRSDKNRGKSDNVPSEEVVKKMKNYWRQLLNAKLITQRKFDNLTKAERGGLSELDKAGFIKRQLVETRQITKHVAQILDSRMNTKYDENDKLIREVKVITLKSKLVSDFRKDFQFYKVREINNYHHAHDAYLNAVVGTALIKKYPKLEGSSGSETPGTSESATPESSGSEVEFSHEYWMRHALTLAKRARDEREVPVGAVLVLNNRVIGEGWNRAIGLHDPTAHAEIMALRQGGLVMQNYRLIDATLYVTFEPCVMCAGAMIHSRIGRVVFGVRNAKTGAAGSLMDVLHYPGMNHRVEITEGILADECAALLCYFFRMPRQSEFVYGDYKVYDVRKMIAKSEQEIGKATAKYFFYSNIMNFFKTEITLANGEIRKRPLIETNGETGEIVWDKGRDFATVRKVLSMPQVNIVKKTEVQTGGFSKESILPKRNSDKLIARKKDWDPKKYGGFDSPTVAYSVLVVAKVEKGKSKKLKSVKELLGITIMERSSFEKNPIDFLEAKGYKEVKKDLIIKLPKYSLFELENGRKRMLASAGELQKGNELALPSKYVNFLYLASHYEKLKGSPEDNEQKQLFVEQHKHYLDEIIEQISEFSKRVILADANLDKVLSAYNKHRDKPIREQAENIIHLFTLTNLGAPAAFKYFDTTIDRKRYTSTKEVLDATLIHQSITGLYETRIDLSQLGGD

SEQ ID NO: 293 - protein, 1541 aa, synthetic construct
  REGION 1..1541: note = Description of artificial sequence: 115.4 Cas9 TadAins1007 polypeptide sequence
MDKKYSIGLAIGTNSVGWAVITDEYKVPSKKFKVLGNTDRHSIKKNLIGALLFDSGETAEATRLKRTARRRYTRRKNRICYLQEIFSNEMAKVDDSFFHRLEESFLVEEDKKHERHPIFGNIVDEVAYHEKYPTIYHLRKKLVDSTDKADLRLIYLALAHMIKFRGHFLIEGDLNPDNSDVDKLFIQLVQTYNQLFEENPINASGVDAKAILSARLSKSRRLENLIAQLPGEKKNGLFGNLIALSLGLTPNFKSNFDLAEDAKLQLSKDTYDDDLDNLLAQIGDQYADLFLAAKNLSDAILLSDILRVNTEITKAPLSASMIKRYDEHHQDLTLLKALVRQQLPEKYKEIFFDQSKNGYAGYIDGGASQEEFYKFIKPILEKMDGTEELLVKLNREDLLRKQRTFDNGSIPHQIHLGELHAILRRQEDFYPFLKDNREKIEKILTFRIPYYVGPLARGNSRFAWMTRKSEETITPWNFEEVVDKGASAQSFIERMTNFDKNLPNEKVLPKHSLLYEYFTVYNELTKVKYVTEGMRKPAFLSGEQKKAIVDLLFKTNRKVTVKQLKEDYFKKIECFDSVEISGVEDRFNASLGTYHDLLKIIKDKDFLDNEENEDILEDIVLTLTLFEDREMIEERLKTYAHLFDDKVMKQLKRRRYTGWGRLSRKLINGIRDKQSGKTILDFLKSDGFANRNFMQLIHDDSLTFKEDIQKAQVSGQGDSLHEHIANLAGSPAIKKGILQTVKVVDELVKVMGRHKPENIVIEMARENQTTQKGQKNSRERMKRIEEGIKELGSQILKEHPVENTQLQNEKLYLYYLQNGRDMYVDQELDINRLSDYDVDHIVPQSFLKDDSIDNKVLTRSDKNRGKSDNVPSEEVVKKMKNYWRQLLNAKLITQRKFDNLTKAERGGLSELDKAGFIKRQLVETRQITKHVAQILDSRMNTKYDENDKLIREVKVITLKSKLVSDFRKDFQFYKVREINNYHHAHDAYLNAVVGTALIKKYPKLESGSSGSETPGTSESATPESSGSEVEFSHEYWMRHALTLAKRARDEREVPVGAVLVLNNRVIGEGWNRAIGLHDPTAHAEIMALRQGGLVMQNYRLIDATLYVTFEPCVMCAGAMIHSRIGRVVFGVRNAKTGAAGSLMDVLHYPGMNHRVEITEGILADECAALLCYFFRMPRQEFVYGDYKVYDVRKMIAKSEQEIGKATAKYFFYSNIMNFFKTEITLANGEIRKRPLIETNGETGEIVWDKGRDFATVRKVLSMPQVNIVKKTEVQTGGFSKESILPKRNSDKLIARKKDWDPKKYGGFDSPTVAYSVLVVAKVEKGKSKKLKSVKELLGITIMERSSFEKNPIDFLEAKGYKEVKKDLIIKLPKYSLFELENGRKRMLASAGELQKGNELALPSKYVNFLYLASHYEKLKGSPEDNEQKQLFVEQHKHYLDEIIEQISEFSKRVILADANLDKVLSAYNKHRDKPIREQAENIIHLFTLTNLGAPAAFKYFDTTIDRKRYTSTKEVLDATLIHQSITGLYETRIDLSQLGGD

SEQ ID NO: 294 - protein, 1541 aa, synthetic construct
  REGION 1..1541: note = Description of artificial sequence: 116.1 Cas9 TadAins C-term truncate2 792 polypeptide sequence
MDKKYSIGLAIGTNSVGWAVITDEYKVPSKKFKVLGNTDRHSIKKNLIGALLFDSGETAEATRLKRTARRRYTRRKNRICYLQEIFSNEMAKVDDSFFHRLEESFLVEEDKKHERHPIFGNIVDEVAYHEKYPTIYHLRKKLVDSTDKADLRLIYLALAHMIKFRGHFLIEGDLNPDNSDVDKLFIQLVQTYNQLFEENPINASGVDAKAILSARLSKSRRLENLIAQLPGEKKNGLFGNLIALSLGLTPNFKSNFDLAEDAKLQLSKDTYDDDLDNLLAQIGDQYADLFLAAKNLSDAILLSDILRVNTEITKAPLSASMIKRYDEHHQDLTLLKALVRQQLPEKYKEIFFDQSKNGYAGYIDGGASQEEFYKFIKPILEKMDGTEELLVKLNREDLLRKQRTFDNGSIPHQIHLGELHAILRRQEDFYPFLKDNREKIEKILTFRIPYYVGPLARGNSRFAWMTRKSEETITPWNFEEVVDKGASAQSFIERMTNFDKNLPNEKVLPKHSLLYEYFTVYNELTKVKYVTEGMRKPAFLSGEQKKAIVDLLFKTNRKVTVKQLKEDYFKKIECFDSVEISGVEDRFNASLGTYHDLLKIIKDKDFLDNEENEDILEDIVLTLTLFEDREMIEERLKTYAHLFDDKVMKQLKRRRYTGWGRLSRKLINGIRDKQSGKTILDFLKSDGFANRNFMQLIHDDSLTFKEDIQKAQVSGQGDSLHEHIANLAGSPAIKKGILQTVKVVDELVKVMGRHKPENIVIEMARENQTTQKGQKNSRERMKRIEEGIKELGGSSGSETPGTSESATPESSGSEVEFSHEYWMRHALTLAKRARDEREVPVGAVLVLNNRVIGEGWNRAIGLHDPTAHAEIMALRQGGLVMQNYRLIDATLYVTFEPCVMCAGAMIHSRIGRVVFGVRNAKTGAAGSLMDVLHYPGMNHRVEITEGILADECAALLCYFFRMPRQSQILKEHPVENTQLQNEKLYLYYLQNGRDMYVDQELDINRLSDYDVDHIVPQSFLKDDSIDNKVLTRSDKNRGKSDNVPSEEVVKKMKNYWRQLLNAKLITQRKFDNLTKAERGGLSELDKAGFIKRQLVETRQITKHVAQILDSRMNTKYDENDKLIREVKVITLKSKLVSDFRKDFQFYKVREINNYHHAHDAYLNAVVGTALIKKYPKLESEFVYGDYKVYDVRKMIAKSEQEIGKATAKYFFYSNIMNFFKTEITLANGEIRKRPLIETNGETGEIVWDKGRDFATVRKVLSMPQVNIVKKTEVQTGGFSKESILPKRNSDKLIARKKDWDPKKYGGFDSPTVAYSVLVVAKVEKGKSKKLKSVKELLGITIMERSSFEKNPIDFLEAKGYKEVKKDLIIKLPKYSLFELENGRKRMLASAGELQKGNELALPSKYVNFLYLASHYEKLKGSPEDNEQKQLFVEQHKHYLDEIIEQISEFSKRVILADANLDKVLSAYNKHRDKPIREQAENIIHLFTLTNLGAPAAFKYFDTTIDRKRYTSTKEVLDATLIHQSITGLYETRIDLSQLGGD

SEQ ID NO: 295 - protein, 1541 aa, synthetic construct
  REGION 1..1541: note = Description of artificial sequence: 116.2 Cas9 TadAins C-term truncate2 791 polypeptide sequence
MDKKYSIGLAIGTNSVGWAVITDEYKVPSKKFKVLGNTDRHSIKKNLIGALLFDSGETAEATRLKRTARRRYTRRKNRICYLQEIFSNEMAKVDDSFFHRLEESFLVEEDKKHERHPIFGNIVDEVAYHEKYPTIYHLRKKLVDSTDKADLRLIYLALAHMIKFRGHFLIEGDLNPDNSDVDKLFIQLVQTYNQLFEENPINASGVDAKAILSARLSKSRRLENLIAQLPGEKKNGLFGNLIALSLGLTPNFKSNFDLAEDAKLQLSKDTYDDDLDNLLAQIGDQYADLFLAAKNLSDAILLSDILRVNTEITKAPLSASMIKRYDEHHQDLTLLKALVRQQLPEKYKEIFFDQSKNGYAGYIDGGASQEEFYKFIKPILEKMDGTEELLVKLNREDLLRKQRTFDNGSIPHQIHLGELHAILRRQEDFYPFLKDNREKIEKILTFRIPYYVGPLARGNSRFAWMTRKSEETITPWNFEEVVDKGASAQSFIERMTNFDKNLPNEKVLPKHSLLYEYFTVYNELTKVKYVTEGMRKPAFLSGEQKKAIVDLLFKTNRKVTVKQLKEDYFKKIECFDSVEISGVEDRFNASLGTYHDLLKIIKDKDFLDNEENEDILEDIVLTLTLFEDREMIEERLKTYAHLFDDKVMKQLKRRRYTGWGRLSRKLINGIRDKQSGKTILDFLKSDGFANRNFMQLIHDDSLTFKEDIQKAQVSGQGDSLHEHIANLAGSPAIKKGILQTVKVVDELVKVMGRHKPENIVIEMARENQTTQKGQKNSRERMKRIEEGIKELGSSGSETPGTSESATPESSGSEVEFSHEYWMRHALTLAKRARDEREVPVGAVLVLNNRVIGEGWNRAIGLHDPTAHAEIMALRQGGLVMQNYRLIDATLYVTFEPCVMCAGAMIHSRIGRVVFGVRNAKTGAAGSLMDVLHYPGMNHRVEITEGILADECAALLCYFFRMPRQGSQILKEHPVENTQLQNEKLYLYYLQNGRDMYVDQELDINRLSDYDVDHIVPQSFLKDDSIDNKVLTRSDKNRGKSDNVPSEEVVKKMKNYWRQLLNAKLITQRKFDNLTKAERGGLSELDKAGFIKRQLVETRQITKHVAQILDSRMNTKYDENDKLIREVKVITLKSKLVSDFRKDFQFYKVREINNYHHAHDAYLNAVVGTALIKKYPKLESEFVYGDYKVYDVRKMIAKSEQEIGKATAKYFFYSNIMNFFKTEITLANGEIRKRPLIETNGETGEIVWDKGRDFATVRKVLSMPQVNIVKKTEVQTGGFSKESILPKRNSDKLIARKKDWDPKKYGGFDSPTVAYSVLVVAKVEKGKSKKLKSVKELLGITIMERSSFEKNPIDFLEAKGYKEVKKDLIIKLPKYSLFELENGRKRMLASAGELQKGNELALPSKYVNFLYLASHYEKLKGSPEDNEQKQLFVEQHKHYLDEIIEQISEFSKRVILADANLDKVLSAYNKHRDKPIREQAENIIHLFTLTNLGAPAAFKYFDTTIDRKRYTSTKEVLDATLIHQSITGLYETRIDLSQLGGD

SEQ ID NO: 296 - protein, 1541 aa, synthetic construct
  REGION 1..1541: note = Description of artificial sequence: 116.3 Cas9 TadAins C-term truncate2 790 polypeptide sequence
MDKKYSIGLAIGTNSVGWAVITDEYKVPSKKFKVLGNTDRHSIKKNLIGALLFDSGETAEATRLKRTARRRYTRRKNRICYLQEIFSNEMAKVDDSFFHRLEESFLVEEDKKHERHPIFGNIVDEVAYHEKYPTIYHLRKKLVDSTDKADLRLIYLALAHMIKFRGHFLIEGDLNPDNSDVDKLFIQLVQTYNQLFEENPINASGVDAKAILSARLSKSRRLENLIAQLPGEKKNGLFGNLIALSLGLTPNFKSNFDLAEDAKLQLSKDTYDDDLDNLLAQIGDQYADLFLAAKNLSDAILLSDILRVNTEITKAPLSASMIKRYDEHHQDLTLLKALVRQQLPEKYKEIFFDQSKNGYAGYIDGGASQEEFYKFIKPILEKMDGTEELLVKLNREDLLRKQRTFDNGSIPHQIHLGELHAILRRQEDFYPFLKDNREKIEKILTFRIPYYVGPLARGNSRFAWMTRKSEETITPWNFEEVVDKGASAQSFIERMTNFDKNLPNEKVLPKHSLLYEYFTVYNELTKVKYVTEGMRKPAFLSGEQKKAIVDLLFKTNRKVTVKQLKEDYFKKIECFDSVEISGVEDRFNASLGTYHDLLKIIKDKDFLDNEENEDILEDIVLTLTLFEDREMIEERLKTYAHLFDDKVMKQLKRRRYTGWGRLSRKLINGIRDKQSGKTILDFLKSDGFANRNFMQLIHDDSLTFKEDIQKAQVSGQGDSLHEHIANLAGSPAIKKGILQTVKVVDELVKVMGRHKPENIVIEMARENQTTQKGQKNSRERMKRIEEGIKEGSSGSETPGTSESATPESSGSEVEFSHEYWMRHALTLAKRARDEREVPVGAVLVLNNRVIGEGWNRAIGLHDPTAHAEIMALRQGGLVMQNYRLIDATLYVTFEPCVMCAGAMIHSRIGRVVFGVRNAKTGAAGSLMDVLHYPGMNHRVEITEGILADECAALLCYFFRMPRQLGSQILKEHPVENTQLQNEKLYLYYLQNGRDMYVDQELDINRLSDYDVDHIVPQSFLKDDSIDNKVLTRSDKNRGKSDNVPSEEVVKKMKNYWRQLLNAKLITQRKFDNLTKAERGGLSELDKAGFIKRQLVETRQITKHVAQILDSRMNTKYDENDKLIREVKVITLKSKLVSDFRKDFQFYKVREINNYHHAHDAYLNAVVGTALIKKYPKLESEFVYGDYKVYDVRKMIAKSEQEIGKATAKYFFYSNIMNFFKTEITLANGEIRKRPLIETNGETGEIVWDKGRDFATVRKVLSMPQVNIVKKTEVQTGGFSKESILPKRNSDKLIARKKDWDPKKYGGFDSPTVAYSVLVVAKVEKGKSKKLKSVKELLGITIMERSSFEKNPIDFLEAKGYKEVKKDLIIKLPKYSLFELENGRKRMLASAGELQKGNELALPSKYVNFLYLASHYEKLKGSPEDNEQKQLFVEQHKHYLDEIIEQISEFSKRVILADANLDKVLSAYNKHRDKPIREQAENIIHLFTLTNLGAPAAFKYFDTTIDRKRYTSTKEVLDATLIHQSITGLYETRIDLSQLGGD

SEQ ID NO: 297 - protein, 1484 aa, synthetic construct
  REGION 1..1484: note = Description of artificial sequence: 117 Cas9 delta 1017-1069 polypeptide sequence
MDKKYSIGLAIGTNSVGWAVITDEYKVPSKKFKVLGNTDRHSIKKNLIGALLFDSGETAEATRLKRTARRRYTRRKNRICYLQEIFSNEMAKVDDSFFHRLEESFLVEEDKKHERHPIFGNIVDEVAYHEKYPTIYHLRKKLVDSTDKADLRLIYLALAHMIKFRGHFLIEGDLNPDNSDVDKLFIQLVQTYNQLFEENPINASGVDAKAILSARLSKSRRLENLIAQLPGEKKNGLFGNLIALSLGLTPNFKSNFDLAEDAKLQLSKDTYDDDLDNLLAQIGDQYADLFLAAKNLSDAILLSDILRVNTEITKAPLSASMIKRYDEHHQDLTLLKALVRQQLPEKYKEIFFDQSKNGYAGYIDGGASQEEFYKFIKPILEKMDGTEELLVKLNREDLLRKQRTFDNGSIPHQIHLGELHAILRRQEDFYPFLKDNREKIEKILTFRIPYYVGPLARGNSRFAWMTRKSEETITPWNFEEVVDKGASAQSFIERMTNFDKNLPNEKVLPKHSLLYEYFTVYNELTKVKYVTEGMRKPAFLSGEQKKAIVDLLFKTNRKVTVKQLKEDYFKKIECFDSVEISGVEDRFNASLGTYHDLLKIIKDKDFLDNEENEDILEDIVLTLTLFEDREMIEERLKTYAHLFDDKVMKQLKRRRYTGWGRLSRKLINGIRDKQSGKTILDFLKSDGFANRNFMQLIHDDSLTFKEDIQKAQVSGQGDSLHEHIANLAGSPAIKKGILQTVKVVDELVKVMGRHKPENIVIEMARENQTTQKGQKNSRERMKRIEEGIKELGSQILKEHPVENTQLQNEKLYLYYLQNGRDMYVDQELDINRLSDYDVDHIVPQSFLKDDSIDNKVLTRSDKNRGKSDNVPSEEVVKKMKNYWRQLLNAKLITQRKFDNLTKAERGGLSELDKAGFIKRQLVETRQITKHVAQILDSRMNTKYDENDKLIREVKVITLKSKLVSDFRKDFQFYKVREINNYHHAHDAYLNAVVGTALIKKYPKLESEFVYGDYKVYSSGSEVEFSHEYWMRHALTLAKRARDEREVPVGAVLVLNNRVIGEGWNRAIGLHDPTAHAEIMALRQGGLVMQNYRLIDATLYVTFEPCVMCAGAMIHSRIGRVVFGVRNAKTGAAGSLMDVLHYPGMNHRVEITEGILADECAALLCYFFRMPRQVFNAQKKAQSSTDGEIVWDKGRDFATVRKVLSMPQVNIVKKTEVQTGGFSKESILPKRNSDKLIARKKDWDPKKYGGFDSPTVAYSVLVVAKVEKGKSKKLKSVKELLGITIMERSSFEKNPIDFLEAKGYKEVKKDLIIKLPKYSLFELENGRKRMLASAGELQKGNELALPSKYVNFLYLASHYEKLKGSPEDNEQKQLFVEQHKHYLDEIIEQISEFSKRVILADANLDKVLSAYNKHRDKPIREQAENIIHLFTLTNLGAPAAFKYFDTTIDRKRYTSTKEVLDATLIHQSITGLYETRIDLSQLGGD

SEQ ID NO: 298 - protein, 1554 aa, synthetic construct
  REGION 1..1554: note = Description of artificial sequence: 118 Cas9 TadA-CP116ins 1067 polypeptide sequence
MDKKYSIGLAIGTNSVGWAVITDEYKVPSKKFKVLGNTDRHSIKKNLIGALLFDSGETAEATRLKRTARRRYTRRKNRICYLQEIFSNEMAKVDDSFFHRLEESFLVEEDKKHERHPIFGNIVDEVAYHEKYPTIYHLRKKLVDSTDKADLRLIYLALAHMIKFRGHFLIEGDLNPDNSDVDKLFIQLVQTYNQLFEENPINASGVDAKAILSARLSKSRRLENLIAQLPGEKKNGLFGNLIALSLGLTPNFKSNFDLAEDAKLQLSKDTYDDDLDNLLAQIGDQYADLFLAAKNLSDAILLSDILRVNTEITKAPLSASMIKRYDEHHQDLTLLKALVRQQLPEKYKEIFFDQSKNGYAGYIDGGASQEEFYKFIKPILEKMDGTEELLVKLNREDLLRKQRTFDNGSIPHQIHLGELHAILRRQEDFYPFLKDNREKIEKILTFRIPYYVGPLARGNSRFAWMTRKSEETITPWNFEEVVDKGASAQSFIERMTNFDKNLPNEKVLPKHSLLYEYFTVYNELTKVKYVTEGMRKPAFLSGEQKKAIVDLLFKTNRKVTVKQLKEDYFKKIECFDSVEISGVEDRFNASLGTYHDLLKIIKDKDFLDNEENEDILEDIVLTLTLFEDREMIEERLKTYAHLFDDKVMKQLKRRRYTGWGRLSRKLINGIRDKQSGKTILDFLKSDGFANRNFMQLIHDDSLTFKEDIQKAQVSGQGDSLHEHIANLAGSPAIKKGILQTVKVVDELVKVMGRHKPENIVIEMARENQTTQKGQKNSRERMKRIEEGIKELGSQILKEHPVENTQLQNEKLYLYYLQNGRDMYVDQELDINRLSDYDVDHIVPQSFLKDDSIDNKVLTRSDKNRGKSDNVPSEEVVKKMKNYWRQLLNAKLITQRKFDNLTKAERGGLSELDKAGFIKRQLVETRQITKHVAQILDSRMNTKYDENDKLIREVKVITLKSKLVSDFRKDFQFYKVREINNYHHAHDAYLNAVVGTALIKKYPKLESEFVYGDYKVYDVRKMIAKSEQEIGKATAKYFFYSNIMNFFKTEITLANGEIRKRPLIETNMNHRVEITEGILADECAALLCYFFRMPRQVFNAQKKAQSSTDGSSGSETPGTSESATPESSGSEVEFSHEYWMRHALTLAKRARDEREVPVGAVLVLNNRVIGEGWNRAIGLHDPTAHAEIMALRQGGLVMQNYRLIDATLYVTFEPCVMCAGAMIHSRIGRVVFGVRNAKTGAAGSLMDVLHYPGGETGEIVWDKGRDFATVRKVLSMPQVNIVKKTEVQTGGFSKESILPKRNSDKLIARKKDWDPKKYGGFDSPTVAYSVLVVAKVEKGKSKKLKSVKELLGITIMERSSFEKNPIDFLEAKGYKEVKKDLIIKLPKYSLFELENGRKRMLASAGELQKGNELALPSKYVNFLYLASHYEKLKGSPEDNEQKQLFVEQHKHYLDEIIEQISEFSKRVILADANLDKVLSAYNKHRDKPIREQAENIIHLFTLTNLGAPAAFKYFDTTIDRKRYTSTKEVLDATLIHQSITGLYETRIDLSQLGGD

SEQ ID NO: 299 - protein, 1554 aa, synthetic construct
  REGION 1..1554: note = Description of artificial sequence: 119 Cas9 TadAins 701 polypeptide sequence
MDKKYSIGLAIGTNSVGWAVITDEYKVPSKKFKVLGNTDRHSIKKNLIGALLFDSGETAEATRLKRTARRRYTRRKNRICYLQEIFSNEMAKVDDSFFHRLEESFLVEEDKKHERHPIFGNIVDEVAYHEKYPTIYHLRKKLVDSTDKADLRLIYLALAHMIKFRGHFLIEGDLNPDNSDVDKLFIQLVQTYNQLFEENPINASGVDAKAILSARLSKSRRLENLIAQLPGEKKNGLFGNLIALSLGLTPNFKSNFDLAEDAKLQLSKDTYDDDLDNLLAQIGDQYADLFLAAKNLSDAILLSDILRVNTEITKAPLSASMIKRYDEHHQDLTLLKALVRQQLPEKYKEIFFDQSKNGYAGYIDGGASQEEFYKFIKPILEKMDGTEELLVKLNREDLLRKQRTFDNGSIPHQIHLGELHAILRRQEDFYPFLKDNREKIEKILTFRIPYYVGPLARGNSRFAWMTRKSEETITPWNFEEVVDKGASAQSFIERMTNFDKNLPNEKVLPKHSLLYEYFTVYNELTKVKYVTEGMRKPAFLSGEQKKAIVDLLFKTNRKVTVKQLKEDYFKKIECFDSVEISGVEDRFNASLGTYHDLLKIIKDKDFLDNEENEDILEDIVLTLTLFEDREMIEERLKTYAHLFDDKVMKQLKRRRYTGWGRLSRKLINGIRDKQSGKTILDFLKSDGFANRNFMQLIHDDSGSSGSETPGTSESATPESSGSEVEFSHEYWMRHALTLAKRARDEREVPVGAVLVLNNRVIGEGWNRAIGLHDPTAHAEIMALRQGGLVMQNYRLIDATLYVTFEPCVMCAGAMIHSRIGRVVFGVRNAKTGAAGSLMDVLHYPGMNHRVEITEGILADECAALLCYFFRMPRQVFNAQKKAQSSTDLTFKEDIQKAQVSGQGDSLHEHIANLAGSPAIKKGILQTVKVVDELVKVMGRHKPENIVIEMARENQTTQKGQKNSRERMKRIEEGIKELGSQILKEHPVENTQLQNEKLYLYYLQNGRDMYVDQELDINRLSDYDVDHIVPQSFLKDDSIDNKVLTRSDKNRGKSDNVPSEEVVKKMKNYWRQLLNAKLITQRKFDNLTKAERGGLSELDKAGFIKRQLVETRQITKHVAQILDSRMNTKYDENDKLIREVKVITLKSKLVSDFRKDFQFYKVREINNYHHAHDAYLNAVVGTALIKKYPKLESEFVYGDYKVYDVRKMIAKSEQEIGKATAKYFFYSNIMNFFKTEITLANGEIRKRPLIETNGETGEIVWDKGRDFATVRKVLSMPQVNIVKKTEVQTGGFSKESILPKRNSDKLIARKKDWDPKKYGGFDSPTVAYSVLVVAKVEKGKSKKLKSVKELLGITIMERSSFEKNPIDFLEAKGYKEVKKDLIIKLPKYSLFELENGRKRMLASAGELQKGNELALPSKYVNFLYLASHYEKLKGSPEDNEQKQLFVEQHKHYLDEIIEQISEFSKRVILADANLDKVLSAYNKHRDKPIREQAENIIHLFTLTNLGAPAAFKYFDTTIDRKRYTSTKEVLDATLIHQSITGLYETRIDLSQLGGD

SEQ ID NO: 300 - protein, 1554 aa, synthetic construct
  REGION 1..1554: note = Description of artificial sequence: 120 Cas9 TadACP136ins 1248 polypeptide sequence
MDKKYSIGLAIGTNSVGWAVITDEYKVPSKKFKVLGNTDRHSIKKNLIGALLFDSGETAEATRLKRTARRRYTRRKNRICYLQEIFSNEMAKVDDSFFHRLEESFLVEEDKKHERHPIFGNIVDEVAYHEKYPTIYHLRKKLVDSTDKADLRLIYLALAHMIKFRGHFLIEGDLNPDNSDVDKLFIQLVQTYNQLFEENPINASGVDAKAILSARLSKSRRLENLIAQLPGEKKNGLFGNLIALSLGLTPNFKSNFDLAEDAKLQLSKDTYDDDLDNLLAQIGDQYADLFLAAKNLSDAILLSDILRVNTEITKAPLSASMIKRYDEHHQDLTLLKALVRQQLPEKYKEIFFDQSKNGYAGYIDGGASQEEFYKFIKPILEKMDGTEELLVKLNREDLLRKQRTFDNGSIPHQIHLGELHAILRRQEDFYPFLKDNREKIEKILTFRIPYYVGPLARGNSRFAWMTRKSEETITPWNFEEVVDKGASAQSFIERMTNFDKNLPNEKVLPKHSLLYEYFTVYNELTKVKYVTEGMRKPAFLSGEQKKAIVDLLFKTNRKVTVKQLKEDYFKKIECFDSVEISGVEDRFNASLGTYHDLLKIIKDKDFLDNEENEDILEDIVLTLTLFEDREMIEERLKTYAHLFDDKVMKQLKRRRYTGWGRLSRKLINGIRDKQSGKTILDFLKSDGFANRNFMQLIHDDSLTFKEDIQKAQVSGQGDSLHEHIANLAGSPAIKKGILQTVKVVDELVKVMGRHKPENIVIEMARENQTTQKGQKNSRERMKRIEEGIKELGSQILKEHPVENTQLQNEKLYLYYLQNGRDMYVDQELDINRLSDYDVDHIVPQSFLKDDSIDNKVLTRSDKNRGKSDNVPSEEVVKKMKNYWRQLLNAKLITQRKFDNLTKAERGGLSELDKAGFIKRQLVETRQITKHVAQILDSRMNTKYDENDKLIREVKVITLKSKLVSDFRKDFQFYKVREINNYHHAHDAYLNAVVGTALIKKYPKLESEFVYGDYKVYDVRKMIAKSEQEIGKATAKYFFYSNIMNFFKTEITLANGEIRKRPLIETNGETGEIVWDKGRDFATVRKVLSMPQVNIVKKTEVQTGGFSKESILPKRNSDKLIARKKDWDPKKYGGFDSPTVAYSVLVVAKVEKGKSKKLKSVKELLGITIMERSSFEKNPIDFLEAKGYKEVKKDLIIKLPKYSLFELENGRKRMLASAGELQKGNELALPSKYVNFLYLASHYEKLKGSMNHRVEITEGILADECAALLCYFFRMPRQVFNAQKKAQSSTDGSSGSETPGTSESATPESSGSEVEFSHEYWMRHALTLAKRARDEREVPVGAVLVLNNRVIGEGWNRAIGLHDPTAHAEIMALRQGGLVMQNYRLIDATLYVTFEPCVMCAGAMIHSRIGRVVFGVRNAKTGAAGSLMDVLHYPGPEDNEQKQLFVEQHKHYLDEIIEQISEFSKRVILADANLDKVLSAYNKHRDKPIREQAENIIHLFTLTNLGAPAAFKYFDTTIDRKRYTSTKEVLDATLIHQSITGLYETRIDLSQLGGD

SEQ ID NO: 301 - protein, 1554 aa, synthetic construct
  REGION 1..1554: note = Description of artificial sequence: 121 Cas9 TadACP136ins 1052 polypeptide sequence
MDKKYSIGLAIGTNSVGWAVITDEYKVPSKKFKVLGNTDRHSIKKNLIGALLFDSGETAEATRLKRTARRRYTRRKNRICYLQEIFSNEMAKVDDSFFHRLEESFLVEEDKKHERHPIFGNIVDEVAYHEKYPTIYHLRKKLVDSTDKADLRLIYLALAHMIKFRGHFLIEGDLNPDNSDVDKLFIQLVQTYNQLFEENPINASGVDAKAILSARLSKSRRLENLIAQLPGEKKNGLFGNLIALSLGLTPNFKSNFDLAEDAKLQLSKDTYDDDLDNLLAQIGDQYADLFLAAKNLSDAILLSDILRVNTEITKAPLSASMIKRYDEHHQDLTLLKALVRQQLPEKYKEIFFDQSKNGYAGYIDGGASQEEFYKFIKPILEKMDGTEELLVKLNREDLLRKQRTFDNGSIPHQIHLGELHAILRRQEDFYPFLKDNREKIEKILTFRIPYYVGPLARGNSRFAWMTRKSEETITPWNFEEVVDKGASAQSFIERMTNFDKNLPNEKVLPKHSLLYEYFTVYNELTKVKYVTEGMRKPAFLSGEQKKAIVDLLFKTNRKVTVKQLKEDYFKKIECFDSVEISGVEDRFNASLGTYHDLLKIIKDKDFLDNEENEDILEDIVLTLTLFEDREMIEERLKTYAHLFDDKVMKQLKRRRYTGWGRLSRKLINGIRDKQSGKTILDFLKSDGFANRNFMQLIHDDSLTFKEDIQKAQVSGQGDSLHEHIANLAGSPAIKKGILQTVKVVDELVKVMGRHKPENIVIEMARENQTTQKGQKNSRERMKRIEEGIKELGSQILKEHPVENTQLQNEKLYLYYLQNGRDMYVDQELDINRLSDYDVDHIVPQSFLKDDSIDNKVLTRSDKNRGKSDNVPSEEVVKKMKNYWRQLLNAKLITQRKFDNLTKAERGGLSELDKAGFIKRQLVETRQITKHVAQILDSRMNTKYDENDKLIREVKVITLKSKLVSDFRKDFQFYKVREINNYHHAHDAYLNAVVGTALIKKYPKLESEFVYGDYKVYDVRKMIAKSEQEIGKATAKYFFYSNIMNFFKTEITLAMNHRVEITEGILADECAALLCYFFRMPRQVFNAQKKAQSSTDGSSGSETPGTSESATPESSGSEVEFSHEYWMRHALTLAKRARDEREVPVGAVLVLNNRVIGEGWNRAIGLHDPTAHAEIMALRQGGLVMQNYRLIDATLYVTFEPCVMCAGAMIHSRIGRVVFGVRNAKTGAAGSLMDVLHYPGNGEIRKRPLIETNGETGEIVWDKGRDFATVRKVLSMPQVNIVKKTEVQTGGFSKESILPKRNSDKLIARKKDWDPKKYGGFDSPTVAYSVLVVAKVEKGKSKKLKSVKELLGITIMERSSFEKNPIDFLEAKGYKEVKKDLIIKLPKYSLFELENGRKRMLASAGELQKGNELALPSKYVNFLYLASHYEKLKGSPEDNEQKQLFVEQHKHYLDEIIEQISEFSKRVILADANLDKVLSAYNKHRDKPIREQAENIIHLFTLTNLGAPAAFKYFDTTIDRKRYTSTKEVLDATLIHQSITGLYETRIDLSQLGGD

SEQ ID NO: 302 - protein, 1554 aa, synthetic construct
  REGION 1..1554: note = Description of artificial sequence: 122 Cas9 TadACP136ins 1041 polypeptide sequence
MDKKYSIGLAIGTNSVGWAVITDEYKVPSKKFKVLGNTDRHSIKKNLIGALLFDSGETAEATRLKRTARRRYTRRKNRICYLQEIFSNEMAKVDDSFFHRLEESFLVEEDKKHERHPIFGNIVDEVAYHEKYPTIYHLRKKLVDSTDKADLRLIYLALAHMIKFRGHFLIEGDLNPDNSDVDKLFIQLVQTYNQLFEENPINASGVDAKAILSARLSKSRRLENLIAQLPGEKKNGLFGNLIALSLGLTPNFKSNFDLAEDAKLQLSKDTYDDDLDNLLAQIGDQYADLFLAAKNLSDAILLSDILRVNTEITKAPLSASMIKRYDEHHQDLTLLKALVRQQLPEKYKEIFFDQSKNGYAGYIDGGASQEEFYKFIKPILEKMDGTEELLVKLNREDLLRKQRTFDNGSIPHQIHLGELHAILRRQEDFYPFLKDNREKIEKILTFRIPYYVGPLARGNSRFAWMTRKSEETITPWNFEEVVDKGASAQSFIERMTNFDKNLPNEKVLPKHSLLYEYFTVYNELTKVKYVTEGMRKPAFLSGEQKKAIVDLLFKTNRKVTVKQLKEDYFKKIECFDSVEISGVEDRFNASLGTYHDLLKIIKDKDFLDNEENEDILEDIVLTLTLFEDREMIEERLKTYAHLFDDKVMKQLKRRRYTGWGRLSRKLINGIRDKQSGKTILDFLKSDGFANRNFMQLIHDDSLTFKEDIQKAQVSGQGDSLHEHIANLAGSPAIKKGILQTVKVVDELVKVMGRHKPENIVIEMARENQTTQKGQKNSRERMKRIEEGIKELGSQILKEHPVENTQLQNEKLYLYYLQNGRDMYVDQELDINRLSDYDVDHIVPQSFLKDDSIDNKVLTRSDKNRGKSDNVPSEEVVKKMKNYWRQLLNAKLITQRKFDNLTKAERGGLSELDKAGFIKRQLVETRQITKHVAQILDSRMNTKYDENDKLIREVKVITLKSKLVSDFRKDFQFYKVREINNYHHAHDAYLNAVVGTALIKKYPKLESEFVYGDYKVYDVRKMIAKSEQEIGKATAKYFFYSMNHRVEITEGILADECAALLCYFFRMPRQVFNAQKKAQSSTDGSSGSETPGTSESATPESSGSEVEFSHEYWMRHALTLAKRARDEREVPVGAVLVLNNRVIGEGWNRAIGLHDPTAHAEIMALRQGGLVMQNYRLIDATLYVTFEPCVMCAGAMIHSRIGRVVFGVRNAKTGAAGSLMDVLHYPGNIMNFFKTEITLANGEIRKRPLIETNGETGEIVWDKGRDFATVRKVLSMPQVNIVKKTEVQTGGFSKESILPKRNSDKLIARKKDWDPKKYGGFDSPTVAYSVLVVAKVEKGKSKKLKSVKELLGITIMERSSFEKNPIDFLEAKGYKEVKKDLIIKLPKYSLFELENGRKRMLASAGELQKGNELALPSKYVNFLYLASHYEKLKGSPEDNEQKQLFVEQHKHYLDEIIEQISEFSKRVILADANLDKVLSAYNKHRDKPIREQAENIIHLFTLTNLGAPAAFKYFDTTIDRKRYTSTKEVLDATLIHQSITGLYETRIDLSQLGGD

SEQ ID NO: 303 - protein, 1554 aa, synthetic construct
  REGION 1..1554: note = Description of artificial sequence: 123 Cas9 TadACP139ins 1299 polypeptide sequence
MDKKYSIGLAIGTNSVGWAVITDEYKVPSKKFKVLGNTDRHSIKKNLIGALLFDSGETAEATRLKRTARRRYTRRKNRICYLQEIFSNEMAKVDDSFFHRLEESFLVEEDKKHERHPIFGNIVDEVAYHEKYPTIYHLRKKLVDSTDKADLRLIYLALAHMIKFRGHFLIEGDLNPDNSDVDKLFIQLVQTYNQLFEENPINASGVDAKAILSARLSKSRRLENLIAQLPGEKKNGLFGNLIALSLGLTPNFKSNFDLAEDAKLQLSKDTYDDDLDNLLAQIGDQYADLFLAAKNLSDAILLSDILRVNTEITKAPLSASMIKRYDEHHQDLTLLKALVRQQLPEKYKEIFFDQSKNGYAGYIDGGASQEEFYKFIKPILEKMDGTEELLVKLNREDLLRKQRTFDNGSIPHQIHLGELHAILRRQEDFYPFLKDNREKIEKILTFRIPYYVGPLARGNSRFAWMTRKSEETITPWNFEEVVDKGASAQSFIERMTNFDKNLPNEKVLPKHSLLYEYFTVYNELTKVKYVTEGMRKPAFLSGEQKKAIVDLLFKTNRKVTVKQLKEDYFKKIECFDSVEISGVEDRFNASLGTYHDLLKIIKDKDFLDNEENEDILEDIVLTLTLFEDREMIEERLKTYAHLFDDKVMKQLKRRRYTGWGRLSRKLINGIRDKQSGKTILDFLKSDGFANRNFMQLIHDDSLTFKEDIQKAQVSGQGDSLHEHIANLAGSPAIKKGILQTVKVVDELVKVMGRHKPENIVIEMARENQTTQKGQKNSRERMKRIEEGIKELGSQILKEHPVENTQLQNEKLYLYYLQNGRDMYVDQELDINRLSDYDVDHIVPQSFLKDDSIDNKVLTRSDKNRGKSDNVPSEEVVKKMKNYWRQLLNAKLITQRKFDNLTKAERGGLSELDKAGFIKRQLVETRQITKHVAQILDSRMNTKYDENDKLIREVKVITLKSKLVSDFRKDFQFYKVREINNYHHAHDAYLNAVVGTALIKKYPKLESEFVYGDYKVYDVRKMIAKSEQEIGKATAKYFFYSNIMNFFKTEITLANGEIRKRPLIETNGETGEIVWDKGRDFATVRKVLSMPQVNIVKKTEVQTGGFSKESILPKRNSDKLIARKKDWDPKKYGGFDSPTVAYSVLVVAKVEKGKSKKLKSVKELLGITIMERSSFEKNPIDFLEAKGYKEVKKDLIIKLPKYSLFELENGRKRMLASAGELQKGNELALPSKYVNFLYLASHYEKLKGSPEDNEQKQLFVEQHKHYLDEIIEQISEFSKRVILADANLDKVLSAYNKHRMNHRVEITEGILADECAALLCYFFRMPRQVFNAQKKAQSSTDGSSGSETPGTSESATPESSGSEVEFSHEYWMRHALTLAKRARDEREVPVGAVLVLNNRVIGEGWNRAIGLHDPTAHAEIMALRQGGLVMQNYRLIDATLYVTFEPCVMCAGAMIHSRIGRVVFGVRNAKTGAAGSLMDVLHYPGDKPIREQAENIIHLFTLTNLGAPAAFKYFDTTIDRKRYTSTKEVLDATLIHQSITGLYETRIDLSQLGGD

SEQ ID NO: 304 - protein, 1454 aa, synthetic construct
  REGION 1..1454: note = Description of artificial sequence: 124 Cas9 delta 792-872 TadAins polypeptide sequence
MDKKYSIGLAIGTNSVGWAVITDEYKVPSKKFKVLGNTDRHSIKKNLIGALLFDSGETAEATRLKRTARRRYTRRKNRICYLQEIFSNEMAKVDDSFFHRLEESFLVEEDKKHERHPIFGNIVDEVAYHEKYPTIYHLRKKLVDSTDKADLRLIYLALAHMIKFRGHFLIEGDLNPDNSDVDKLFIQLVQTYNQLFEENPINASGVDAKAILSARLSKSRRLENLIAQLPGEKKNGLFGNLIALSLGLTPNFKSNFDLAEDAKLQLSKDTYDDDLDNLLAQIGDQYADLFLAAKNLSDAILLSDILRVNTEITKAPLSASMIKRYDEHHQDLTLLKALVRQQLPEKYKEIFFDQSKNGYAGYIDGGASQEEFYKFIKPILEKMDGTEELLVKLNREDLLRKQRTFDNGSIPHQIHLGELHAILRRQEDFYPFLKDNREKIEKILTFRIPYYVGPLARGNSRFAWMTRKSEETITPWNFEEVVDKGASAQSFIERMTNFDKNLPNEKVLPKHSLLYEYFTVYNELTKVKYVTEGMRKPAFLSGEQKKAIVDLLFKTNRKVTVKQLKEDYFKKIECFDSVEISGVEDRFNASLGTYHDLLKIIKDKDFLDNEENEDILEDIVLTLTLFEDREMIEERLKTYAHLFDDKVMKQLKRRRYTGWGRLSRKLINGIRDKQSGKTILDFLKSDGFANRNFMQLIHDDSLTFKEDIQKAQVSGQGDSLHEHIANLAGSPAIKKGILQTVKVVDELVKVMGRHKPENIVIEMARENQTTQKGQKNSRERMKRIEEGIKELGSEVEFSHEYWMRHALTLAKRARDEREVPVGAVLVLNNRVIGEGWNRAIGLHDPTAHAEIMALRQGGLVMQNYRLIDATLYVTFEPCVMCAGAMIHSRIGRVVFGVRNAKTGAAGSLMDVLHYPGMNHRVEITEGILADECAALLCYFFRMPRQVFNAQKKAQSSTDEEVVKKMKNYWRQLLNAKLITQRKFDNLTKAERGGLSELDKAGFIKRQLVETRQITKHVAQILDSRMNTKYDENDKLIREVKVITLKSKLVSDFRKDFQFYKVREINNYHHAHDAYLNAVVGTALIKKYPKLESEFVYGDYKVYDVRKMIAKSEQEIGKATAKYFFYSNIMNFFKTEITLANGEIRKRPLIETNGETGEIVWDKGRDFATVRKVLSMPQVNIVKKTEVQTGGFSKESILPKRNSDKLIARKKDWDPKKYGGFDSPTVAYSVLVVAKVEKGKSKKLKSVKELLGITIMERSSFEKNPIDFLEAKGYKEVKKDLIIKLPKYSLFELENGRKRMLASAGELQKGNELALPSKYVNFLYLASHYEKLKGSPEDNEQKQLFVEQHKHYLDEIIEQISEFSKRVILADANLDKVLSAYNKHRDKPIREQAENIIHLFTLTNLGAPAAFKYFDTTIDRKRYTSTKEVLDATLIHQSITGLYETRIDLSQLGGD

SEQ ID NO: 305 - protein, 1420 aa, synthetic construct
  REGION 1..1420: note = Description of artificial sequence: 125 Cas9 delta 792-906 TadAins polypeptide sequence
MDKKYSIGLAIGTNSVGWAVITDEYKVPSKKFKVLGNTDRHSIKKNLIGALLFDSGETAEATRLKRTARRRYTRRKNRICYLQEIFSNEMAKVDDSFFHRLEESFLVEEDKKHERHPIFGNIVDEVAYHEKYPTIYHLRKKLVDSTDKADLRLIYLALAHMIKFRGHFLIEGDLNPDNSDVDKLFIQLVQTYNQLFEENPINASGVDAKAILSARLSKSRRLENLIAQLPGEKKNGLFGNLIALSLGLTPNFKSNFDLAEDAKLQLSKDTYDDDLDNLLAQIGDQYADLFLAAKNLSDAILLSDILRVNTEITKAPLSASMIKRYDEHHQDLTLLKALVRQQLPEKYKEIFFDQSKNGYAGYIDGGASQEEFYKFIKPILEKMDGTEELLVKLNREDLLRKQRTFDNGSIPHQIHLGELHAILRRQEDFYPFLKDNREKIEKILTFRIPYYVGPLARGNSRFAWMTRKSEETITPWNFEEVVDKGASAQSFIERMTNFDKNLPNEKVLPKHSLLYEYFTVYNELTKVKYVTEGMRKPAFLSGEQKKAIVDLLFKTNRKVTVKQLKEDYFKKIECFDSVEISGVEDRFNASLGTYHDLLKIIKDKDFLDNEENEDILEDIVLTLTLFEDREMIEERLKTYAHLFDDKVMKQLKRRRYTGWGRLSRKLINGIRDKQSGKTILDFLKSDGFANRNFMQLIHDDSLTFKEDIQKAQVSGQGDSLHEHIANLAGSPAIKKGILQTVKVVDELVKVMGRHKPENIVIEMARENQTTQKGQKNSRERMKRIEEGIKELGSEVEFSHEYWMRHALTLAKRARDEREVPVGAVLVLNNRVIGEGWNRAIGLHDPTAHAEIMALRQGGLVMQNYRLIDATLYVTFEPCVMCAGAMIHSRIGRVVFGVRNAKTGAAGSLMDVLHYPGMNHRVEITEGILADECAALLCYFFRMPRQVFNAQKKAQSSTDGLSELDKAGFIKRQLVETRQITKHVAQILDSRMNTKYDENDKLIREVKVITLKSKLVSDFRKDFQFYKVREINNYHHAHDAYLNAVVGTALIKKYPKLESEFVYGDYKVYDVRKMIAKSEQEIGKATAKYFFYSNIMNFFKTEITLANGEIRKRPLIETNGETGEIVWDKGRDFATVRKVLSMPQVNIVKKTEVQTGGFSKESILPKRNSDKLIARKKDWDPKKYGGFDSPTVAYSVLVVAKVEKGKSKKLKSVKELLGITIMERSSFEKNPIDFLEAKGYKEVKKDLIIKLPKYSLFELENGRKRMLASAGELQKGNELALPSKYVNFLYLASHYEKLKGSPEDNEQKQLFVEQHKHYLDEIIEQISEFSKRVILADANLDKVLSAYNKHRDKPIREQAENIIHLFTLTNLGAPAAFKYFDTTIDRKRYTSTKEVLDATLIHQSITGLYETRIDLSQLGGD

SEQ ID NO: 306 - protein, 1554 aa, synthetic construct
  REGION 1..1554: note = Description of artificial sequence: 126 TadA CP65ins 1003 polypeptide sequence
MDKKYSIGLAIGTNSVGWAVITDEYKVPSKKFKVLGNTDRHSIKKNLIGALLFDSGETAEATRLKRTARRRYTRRKNRICYLQEIFSNEMAKVDDSFFHRLEESFLVEEDKKHERHPIFGNIVDEVAYHEKYPTIYHLRKKLVDSTDKADLRLIYLALAHMIKFRGHFLIEGDLNPDNSDVDKLFIQLVQTYNQLFEENPINASGVDAKAILSARLSKSRRLENLIAQLPGEKKNGLFGNLIALSLGLTPNFKSNFDLAEDAKLQLSKDTYDDDLDNLLAQIGDQYADLFLAAKNLSDAILLSDILRVNTEITKAPLSASMIKRYDEHHQDLTLLKALVRQQLPEKYKEIFFDQSKNGYAGYIDGGASQEEFYKFIKPILEKMDGTEELLVKLNREDLLRKQRTFDNGSIPHQIHLGELHAILRRQEDFYPFLKDNREKIEKILTFRIPYYVGPLARGNSRFAWMTRKSEETITPWNFEEVVDKGASAQSFIERMTNFDKNLPNEKVLPKHSLLYEYFTVYNELTKVKYVTEGMRKPAFLSGEQKKAIVDLLFKTNRKVTVKQLKEDYFKKIECFDSVEISGVEDRFNASLGTYHDLLKIIKDKDFLDNEENEDILEDIVLTLTLFEDREMIEERLKTYAHLFDDKVMKQLKRRRYTGWGRLSRKLINGIRDKQSGKTILDFLKSDGFANRNFMQLIHDDSLTFKEDIQKAQVSGQGDSLHEHIANLAGSPAIKKGILQTVKVVDELVKVMGRHKPENIVIEMARENQTTQKGQKNSRERMKRIEEGIKELGSQILKEHPVENTQLQNEKLYLYYLQNGRDMYVDQELDINRLSDYDVDHIVPQSFLKDDSIDNKVLTRSDKNRGKSDNVPSEEVVKKMKNYWRQLLNAKLITQRKFDNLTKAERGGLSELDKAGFIKRQLVETRQITKHVAQILDSRMNTKYDENDKLIREVKVITLKSKLVSDFRKDFQFYKVREINNYHHAHDAYLNAVVGTALIKKYPKTAHAEIMALRQGGLVMQNYRLIDATLYVTFEPCVMCAGAMIHSRIGRVVFGVRNAKTGAAGSLMDVLHYPGMNHRVEITEGILADECAALLCYFFRMPRQVFNAQKKAQSSTDGSSGSETPGTSESATPESSGSEVEFSHEYWMRHALTLAKRARDEREVPVGAVLVLNNRVIGEGWNRAIGLHDPLESEFVYGDYKVYDVRKMIAKSEQEIGKATAKYFFYSNIMNFFKTEITLANGEIRKRPLIETNGETGEIVWDKGRDFATVRKVLSMPQVNIVKKTEVQTGGFSKESILPKRNSDKLIARKKDWDPKKYGGFDSPTVAYSVLVVAKVEKGKSKKLKSVKELLGITIMERSSFEKNPIDFLEAKGYKEVKKDLIIKLPKYSLFELENGRKRMLASAGELQKGNELALPSKYVNFLYLASHYEKLKGSPEDNEQKQLFVEQHKHYLDEIIEQISEFSKRVILADANLDKVLSAYNKHRDKPIREQAENIIHLFTLTNLGAPAAFKYFDTTIDRKRYTSTKEVLDATLIHQSITGLYETRIDLSQLGGD

SEQ ID NO: 307 - protein, 1554 aa, synthetic construct
  REGION 1..1554: note = Description of artificial sequence: 127 TadA CP65ins 1016 polypeptide sequence
MDKKYSIGLAIGTNSVGWAVITDEYKVPSKKFKVLGNTDRHSIKKNLIGALLFDSGETAEATRLKRTARRRYTRRKNRICYLQEIFSNEMAKVDDSFFHRLEESFLVEEDKKHERHPIFGNIVDEVAYHEKYPTIYHLRKKLVDSTDKADLRLIYLALAHMIKFRGHFLIEGDLNPDNSDVDKLFIQLVQTYNQLFEENPINASGVDAKAILSARLSKSRRLENLIAQLPGEKKNGLFGNLIALSLGLTPNFKSNFDLAEDAKLQLSKDTYDDDLDNLLAQIGDQYADLFLAAKNLSDAILLSDILRVNTEITKAPLSASMIKRYDEHHQDLTLLKALVRQQLPEKYKEIFFDQSKNGYAGYIDGGASQEEFYKFIKPILEKMDGTEELLVKLNREDLLRKQRTFDNGSIPHQIHLGELHAILRRQEDFYPFLKDNREKIEKILTFRIPYYVGPLARGNSRFAWMTRKSEETITPWNFEEVVDKGASAQSFIERMTNFDKNLPNEKVLPKHSLLYEYFTVYNELTKVKYVTEGMRKPAFLSGEQKKAIVDLLFKTNRKVTVKQLKEDYFKKIECFDSVEISGVEDRFNASLGTYHDLLKIIKDKDFLDNEENEDILEDIVLTLTLFEDREMIEERLKTYAHLFDDKVMKQLKRRRYTGWGRLSRKLINGIRDKQSGKTILDFLKSDGFANRNFMQLIHDDSLTFKEDIQKAQVSGQGDSLHEHIANLAGSPAIKKGILQTVKVVDELVKVMGRHKPENIVIEMARENQTTQKGQKNSRERMKRIEEGIKELGSQILKEHPVENTQLQNEKLYLYYLQNGRDMYVDQELDINRLSDYDVDHIVPQSFLKDDSIDNKVLTRSDKNRGKSDNVPSEEVVKKMKNYWRQLLNAKLITQRKFDNLTKAERGGLSELDKAGFIKRQLVETRQITKHVAQILDSRMNTKYDENDKLIREVKVITLKSKLVSDFRKDFQFYKVREINNYHHAHDAYLNAVVGTALIKKYPKLESEFVYGDYKVTAHAEIMALRQGGLVMQNYRLIDATLYVTFEPCVMCAGAMIHSRIGRVVFGVRNAKTGAAGSLMDVLHYPGMNHRVEITEGILADECAALLCYFFRMPRQVFNAQKKAQSSTDGSSGSETPGTSESATPESSGSEVEFSHEYWMRHALTLAKRARDEREVPVGAVLVLNNRVIGEGWNRAIGLHDPYDVRKMIAKSEQEIGKATAKYFFYSNIMNFFKTEITLANGEIRKRPLIETNGETGEIVWDKGRDFATVRKVLSMPQVNIVKKTEVQTGGFSKESILPKRNSDKLIARKKDWDPKKYGGFDSPTVAYSVLVVAKVEKGKSKKLKSVKELLGITIMERSSFEKNPIDFLEAKGYKEVKKDLIIKLPKYSLFELENGRKRMLASAGELQKGNELALPSKYVNFLYLASHYEKLKGSPEDNEQKQLFVEQHKHYLDEIIEQISEFSKRVILADANLDKVLSAYNKHRDKPIREQAENIIHLFTLTNLGAPAAFKYFDTTIDRKRYTSTKEVLDATLIHQSITGLYETRIDLSQLGGD

SEQ ID NO: 308 - protein, 1554 aa, synthetic construct
  REGION 1..1554: note = Description of artificial sequence: 128 TadA CP65ins 1022 polypeptide sequence
MDKKYSIGLAIGTNSVGWAVITDEYKVPSKKFKVLGNTDRHSIKKNLIGALLFDSGETAEATRLKRTARRRYTRRKNRICYLQEIFSNEMAKVDDSFFHRLEESFLVEEDKKHERHPIFGNIVDEVAYHEKYPTIYHLRKKLVDSTDKADLRLIYLALAHMIKFRGHFLIEGDLNPDNSDVDKLFIQLVQTYNQLFEENPINASGVDAKAILSARLSKSRRLENLIAQLPGEKKNGLFGNLIALSLGLTPNFKSNFDLAEDAKLQLSKDTYDDDLDNLLAQIGDQYADLFLAAKNLSDAILLSDILRVNTEITKAPLSASMIKRYDEHHQDLTLLKALVRQQLPEKYKEIFFDQSKNGYAGYIDGGASQEEFYKFIKPILEKMDGTEELLVKLNREDLLRKQRTFDNGSIPHQIHLGELHAILRRQEDFYPFLKDNREKIEKILTFRIPYYVGPLARGNSRFAWMTRKSEETITPWNFEEVVDKGASAQSFIERMTNFDKNLPNEKVLPKHSLLYEYFTVYNELTKVKYVTEGMRKPAFLSGEQKKAIVDLLFKTNRKVTVKQLKEDYFKKIECFDSVEISGVEDRFNASLGTYHDLLKIIKDKDFLDNEENEDILEDIVLTLTLFEDREMIEERLKTYAHLFDDKVMKQLKRRRYTGWGRLSRKLINGIRDKQSGKTILDFLKSDGFANRNFMQLIHDDSLTFKEDIQKAQVSGQGDSLHEHIANLAGSPAIKKGILQTVKVVDELVKVMGRHKPENIVIEMARENQTTQKGQKNSRERMKRIEEGIKELGSQILKEHPVENTQLQNEKLYLYYLQNGRDMYVDQELDINRLSDYDVDHIVPQSFLKDDSIDNKVLTRSDKNRGKSDNVPSEEVVKKMKNYWRQLLNAKLITQRKFDNLTKAERGGLSELDKAGFIKRQLVETRQITKHVAQILDSRMNTKYDENDKLIREVKVITLKSKLVSDFRKDFQFYKVREINNYHHAHDAYLNAVVGTALIKKYPKLESEFVYGDYKVYDVRKMITAHAEIMALRQGGLVMQNYRLIDATLYVTFEPCVMCAGAMIHSRIGRVVFGVRNAKTGAAGSLMDVLHYPGMNHRVEITEGILADECAALLCYFFRMPRQVFNAQKKAQSSTDGSSGSETPGTSESATPESSGSEVEFSHEYWMRHALTLAKRARDEREVPVGAVLVLNNRVIGEGWNRAIGLHDPAKSEQEIGKATAKYFFYSNIMNFFKTEITLANGEIRKRPLIETNGETGEIVWDKGRDFATVRKVLSMPQVNIVKKTEVQTGGFSKESILPKRNSDKLIARKKDWDPKKYGGFDSPTVAYSVLVVAKVEKGKSKKLKSVKELLGITIMERSSFEKNPIDFLEAKGYKEVKKDLIIKLPKYSLFELENGRKRMLASAGELQKGNELALPSKYVNFLYLASHYEKLKGSPEDNEQKQLFVEQHKHYLDEIIEQISEFSKRVILADANLDKVLSAYNKHRDKPIREQAENIIHLFTLTNLGAPAAFKYFDTTIDRKRYTSTKEVLDATLIHQSITGLYETRIDLSQLGGD

SEQ ID NO: 309 - protein, 1554 aa, synthetic construct
  REGION 1..1554: note = Description of artificial sequence: 129 TadA CP65ins 1029 polypeptide sequence
MDKKYSIGLAIGTNSVGWAVITDEYKVPSKKFKVLGNTDRHSIKKNLIGALLFDSGETAEATRLKRTARRRYTRRKNRICYLQEIFSNEMAKVDDSFFHRLEESFLVEEDKKHERHPIFGNIVDEVAYHEKYPTIYHLRKKLVDSTDKADLRLIYLALAHMIKFRGHFLIEGDLNPDNSDVDKLFIQLVQTYNQLFEENPINASGVDAKAILSARLSKSRRLENLIAQLPGEKKNGLFGNLIALSLGLTPNFKSNFDLAEDAKLQLSKDTYDDDLDNLLAQIGDQYADLFLAAKNLSDAILLSDILRVNTEITKAPLSASMIKRYDEHHQDLTLLKALVRQQLPEKYKEIFFDQSKNGYAGYIDGGASQEEFYKFIKPILEKMDGTEELLVKLNREDLLRKQRTFDNGSIPHQIHLGELHAILRRQEDFYPFLKDNREKIEKILTFRIPYYVGPLARGNSRFAWMTRKSEETITPWNFEEVVDKGASAQSFIERMTNFDKNLPNEKVLPKHSLLYEYFTVYNELTKVKYVTEGMRKPAFLSGEQKKAIVDLLFKTNRKVTVKQLKEDYFKKIECFDSVEISGVEDRFNASLGTYHDLLKIIKDKDFLDNEENEDILEDIVLTLTLFEDREMIEERLKTYAHLFDDKVMKQLKRRRYTGWGRLSRKLINGIRDKQSGKTILDFLKSDGFANRNFMQLIHDDSLTFKEDIQKAQVSGQGDSLHEHIANLAGSPAIKKGILQTVKVVDELVKVMGRHKPENIVIEMARENQTTQKGQKNSRERMKRIEEGIKELGSQILKEHPVENTQLQNEKLYLYYLQNGRDMYVDQELDINRLSDYDVDHIVPQSFLKDDSIDNKVLTRSDKNRGKSDNVPSEEVVKKMKNYWRQLLNAKLITQRKFDNLTKAERGGLSELDKAGFIKRQLVETRQITKHVAQILDSRMNTKYDENDKLIREVKVITLKSKLVSDFRKDFQFYKVREINNYHHAHDAYLNAVVGTALIKKYPKLESEFVYGDYKVYDVRKMIAKSEQEITAHAEIMALRQGGLVMQNYRLIDATLYVTFEPCVMCAGAMIHSRIGRVVFGVRNAKTGAAGSLMDVLHYPGMNHRVEITEGILADECAALLCYFFRMPRQVFNAQKKAQSSTDGSSGSETPGTSESATPESSGSEVEFSHEYWMRHALTLAKRARDEREVPVGAVLVLNNRVIGEGWNRAIGLHDPGKATAKYFFYSNIMNFFKTEITLANGEIRKRPLIETNGETGEIVWDKGRDFATVRKVLSMPQVNIVKKTEVQTGGFSKESILPKRNSDKLIARKKDWDPKKYGGFDSPTVAYSVLVVAKVEKGKSKKLKSVKELLGITIMERSSFEKNPIDFLEAKGYKEVKKDLIIKLPKYSLFELENGRKRMLASAGELQKGNELALPSKYVNFLYLASHYEKLKGSPEDNEQKQLFVEQHKHYLDEIIEQISEFSKRVILADANLDKVLSAYNKHRDKPIREQAENIIHLFTLTNLGAPAAFKYFDTTIDRKRYTSTKEVLDATLIHQSITGLYETRIDLSQLGGD

SEQ ID NO: 310 - protein, 1554 aa, synthetic construct
  REGION 1..1554: note = Description of artificial sequence: 130 TadA CP65ins 1041 polypeptide sequence
MDKKYSIGLAIGTNSVGWAVITDEYKVPSKKFKVLGNTDRHSIKKNLIGALLFDSGETAEATRLKRTARRRYTRRKNRICYLQEIFSNEMAKVDDSFFHRLEESFLVEEDKKHERHPIFGNIVDEVAYHEKYPTIYHLRKKLVDSTDKADLRLIYLALAHMIKFRGHFLIEGDLNPDNSDVDKLFIQLVQTYNQLFEENPINASGVDAKAILSARLSKSRRLENLIAQLPGEKKNGLFGNLIALSLGLTPNFKSNFDLAEDAKLQLSKDTYDDDLDNLLAQIGDQYADLFLAAKNLSDAILLSDILRVNTEITKAPLSASMIKRYDEHHQDLTLLKALVRQQLPEKYKEIFFDQSKNGYAGYIDGGASQEEFYKFIKPILEKMDGTEELLVKLNREDLLRKQRTFDNGSIPHQIHLGELHAILRRQEDFYPFLKDNREKIEKILTFRIPYYVGPLARGNSRFAWMTRKSEETITPWNFEEVVDKGASAQSFIERMTNFDKNLPNEKVLPKHSLLYEYFTVYNELTKVKYVTEGMRKPAFLSGEQKKAIVDLLFKTNRKVTVKQLKEDYFKKIECFDSVEISGVEDRFNASLGTYHDLLKIIKDKDFLDNEENEDILEDIVLTLTLFEDREMIEERLKTYAHLFDDKVMKQLKRRRYTGWGRLSRKLINGIRDKQSGKTILDFLKSDGFANRNFMQLIHDDSLTFKEDIQKAQVSGQGDSLHEHIANLAGSPAIKKGILQTVKVVDELVKVMGRHKPENIVIEMARENQTTQKGQKNSRERMKRIEEGIKELGSQILKEHPVENTQLQNEKLYLYYLQNGRDMYVDQELDINRLSDYDVDHIVPQSFLKDDSIDNKVLTRSDKNRGKSDNVPSEEVVKKMKNYWRQLLNAKLITQRKFDNLTKAERGGLSELDKAGFIKRQLVETRQITKHVAQILDSRMNTKYDENDKLIREVKVITLKSKLVSDFRKDFQFYKVREINNYHHAHDAYLNAVVGTALIKKYPKLESEFVYGDYKVYDVRKMIAKSEQEIGKATAKYFFYSTAHAEIMALRQGGLVMQNYRLIDATLYVTFEPCVMCAGAMIHSRIGRVVFGVRNAKTGAAGSLMDVLHYPGMNHRVEITEGILADECAALLCYFFRMPRQVFNAQKKAQSSTDGSSGSETPGTSESATPESSGSEVEFSHEYWMRHALTLAKRARDEREVPVGAVLVLNNRVIGEGWNRAIGLHDPNIMNFFKTEITLANGEIRKRPLIETNGETGEIVWDKGRDFATVRKVLSMPQVNIVKKTEVQTGGFSKESILPKRNSDKLIARKKDWDPKKYGGFDSPTVAYSVLVVAKVEKGKSKKLKSVKELLGITIMERSSFEKNPIDFLEAKGYKEVKKDLIIKLPKYSLFELENGRKRMLASAGELQKGNELALPSKYVNFLYLASHYEKLKGSPEDNEQKQLFVEQHKHYLDEIIEQISEFSKRVILADANLDKVLSAYNKHRDKPIREQAENIIHLFTLTNLGAPAAFKYFDTTIDRKRYTSTKEVLDATLIHQSITGLYETRIDLSQLGGD

SEQ ID NO: 311 - protein, 1554 aa, synthetic construct
  REGION 1..1554: note = Description of artificial sequence: 131 TadA CP65ins 1054 polypeptide sequence
MDKKYSIGLAIGTNSVGWAVITDEYKVPSKKFKVLGNTDRHSIKKNLIGALLFDSGETAEATRLKRTARRRYTRRKNRICYLQEIFSNEMAKVDDSFFHRLEESFLVEEDKKHERHPIFGNIVDEVAYHEKYPTIYHLRKKLVDSTDKADLRLIYLALAHMIKFRGHFLIEGDLNPDNSDVDKLFIQLVQTYNQLFEENPINASGVDAKAILSARLSKSRRLENLIAQLPGEKKNGLFGNLIALSLGLTPNFKSNFDLAEDAKLQLSKDTYDDDLDNLLAQIGDQYADLFLAAKNLSDAILLSDILRVNTEITKAPLSASMIKRYDEHHQDLTLLKALVRQQLPEKYKEIFFDQSKNGYAGYIDGGASQEEFYKFIKPILEKMDGTEELLVKLNREDLLRKQRTFDNGSIPHQIHLGELHAILRRQEDFYPFLKDNREKIEKILTFRIPYYVGPLARGNSRFAWMTRKSEETITPWNFEEVVDKGASAQSFIERMTNFDKNLPNEKVLPKHSLLYEYFTVYNELTKVKYVTEGMRKPAFLSGEQKKAIVDLLFKTNRKVTVKQLKEDYFKKIECFDSVEISGVEDRFNASLGTYHDLLKIIKDKDFLDNEENEDILEDIVLTLTLFEDREMIEERLKTYAHLFDDKVMKQLKRRRYTGWGRLSRKLINGIRDKQSGKTILDFLKSDGFANRNFMQLIHDDSLTFKEDIQKAQVSGQGDSLHEHIANLAGSPAIKKGILQTVKVVDELVKVMGRHKPENIVIEMARENQTTQKGQKNSRERMKRIEEGIKELGSQILKEHPVENTQLQNEKLYLYYLQNGRDMYVDQELDINRLSDYDVDHIVPQSFLKDDSIDNKVLTRSDKNRGKSDNVPSEEVVKKMKNYWRQLLNAKLITQRKFDNLTKAERGGLSELDKAGFIKRQLVETRQITKHVAQILDSRMNTKYDENDKLIREVKVITLKSKLVSDFRKDFQFYKVREINNYHHAHDAYLNAVVGTALIKKYPKLESEFVYGDYKVYDVRKMIAKSEQEIGKATAKYFFYSNIMNFFKTEITLANTAHAEIMALRQGGLVMQNYRLIDATLYVTFEPCVMCAGAMIHSRIGRVVFGVRNAKTGAAGSLMDVLHYPGMNHRVEITEGILADECAALLCYFFRMPRQVFNAQKKAQSSTDGSSGSETPGTSESATPESSGSEVEFSHEYWMRHALTLAKRARDEREVPVGAVLVLNNRVIGEGWNRAIGLHDPGEIRKRPLIETNGETGEIVWDKGRDFATVRKVLSMPQVNIVKKTEVQTGGFSKESILPKRNSDKLIARKKDWDPKKYGGFDSPTVAYSVLVVAKVEKGKSKKLKSVKELLGITIMERSSFEKNPIDFLEAKGYKEVKKDLIIKLPKYSLFELENGRKRMLASAGELQKGNELALPSKYVNFLYLASHYEKLKGSPEDNEQKQLFVEQHKHYLDEIIEQISEFSKRVILADANLDKVLSAYNKHRDKPIREQAENIIHLFTLTNLGAPAAFKYFDTTIDRKRYTSTKEVLDATLIHQSITGLYETRIDLSQLGGD

SEQ ID NO: 312 - protein, 1554 aa, synthetic construct
  REGION 1..1554: note = Description of artificial sequence: 132 TadA CP65ins 1246 polypeptide sequence
MDKKYSIGLAIGTNSVGWAVITDEYKVPSKKFKVLGNTDRHSIKKNLIGALLFDSGETAEATRLKRTARRRYTRRKNRICYLQEIFSNEMAKVDDSFFHRLEESFLVEEDKKHERHPIFGNIVDEVAYHEKYPTIYHLRKKLVDSTDKADLRLIYLALAHMIKFRGHFLIEGDLNPDNSDVDKLFIQLVQTYNQLFEENPINASGVDAKAILSARLSKSRRLENLIAQLPGEKKNGLFGNLIALSLGLTPNFKSNFDLAEDAKLQLSKDTYDDDLDNLLAQIGDQYADLFLAAKNLSDAILLSDILRVNTEITKAPLSASMIKRYDEHHQDLTLLKALVRQQLPEKYKEIFFDQSKNGYAGYIDGGASQEEFYKFIKPILEKMDGTEELLVKLNREDLLRKQRTFDNGSIPHQIHLGELHAILRRQEDFYPFLKDNREKIEKILTFRIPYYVGPLARGNSRFAWMTRKSEETITPWNFEEVVDKGASAQSFIERMTNFDKNLPNEKVLPKHSLLYEYFTVYNELTKVKYVTEGMRKPAFLSGEQKKAIVDLLFKTNRKVTVKQLKEDYFKKIECFDSVEISGVEDRFNASLGTYHDLLKIIKDKDFLDNEENEDILEDIVLTLTLFEDREMIEERLKTYAHLFDDKVMKQLKRRRYTGWGRLSRKLINGIRDKQSGKTILDFLKSDGFANRNFMQLIHDDSLTFKEDIQKAQVSGQGDSLHEHIANLAGSPAIKKGILQTVKVVDELVKVMGRHKPENIVIEMARENQTTQKGQKNSRERMKRIEEGIKELGSQILKEHPVENTQLQNEKLYLYYLQNGRDMYVDQELDINRLSDYDVDHIVPQSFLKDDSIDNKVLTRSDKNRGKSDNVPSEEVVKKMKNYWRQLLNAKLITQRKFDNLTKAERGGLSELDKAGFIKRQLVETRQITKHVAQILDSRMNTKYDENDKLIREVKVITLKSKLVSDFRKDFQFYKVREINNYHHAHDAYLNAVVGTALIKKYPKLESEFVYGDYKVYDVRKMIAKSEQEIGKATAKYFFYSNIMNFFKTEITLANGEIRKRPLIETNGETGEIVWDKGRDFATVRKVLSMPQVNIVKKTEVQTGGFSKESILPKRNSDKLIARKKDWDPKKYGGFDSPTVAYSVLVVAKVEKGKSKKLKSVKELLGITIMERSSFEKNPIDFLEAKGYKEVKKDLIIKLPKYSLFELENGRKRMLASAGELQKGNELALPSKYVNFLYLASHYEKLKGTAHAEIMALRQGGLVMQNYRLIDATLYVTFEPCVMCAGAMIHSRIGRVVFGVRNAKTGAAGSLMDVLHYPGMNHRVEITEGILADECAALLCYFFRMPRQVFNAQKKAQSSTDGSSGSETPGTSESATPESSGSEVEFSHEYWMRHALTLAKRARDEREVPVGAVLVLNNRVIGEGWNRAIGLHDPSPEDNEQKQLFVEQHKHYLDEIIEQISEFSKRVILADANLDKVLSAYNKHRDKPIREQAENIIHLFTLTNLGAPAAFKYFDTTIDRKRYTSTKEVLDATLIHQSITGLYETRIDLSQLGGD

SEQ ID NO: 313 - protein, 160 aa, Staphylococcus aureus
  REGION 1..160: note = MISC_FEATURE - TadA polypeptide sequence
MGSHMTNDIYFMTLAIEEAKKAAQLGEVPIGAIITKDDEVIARAHNLRETLQQPTAHAEHIAIERAAKVLGSWRLEGCTLYVTLEPCVMCAGTIVMSRIPRVVYGADDPKGGCSGSLMNLLQQSNFNHRAIVDKGVLKEACSTLLTTFFKNLRANKKSTN

SEQ ID NO: 314 - protein, 161 aa, Bacillus subtilis
  REGION 1..161: note = MISC_FEATURE - TadA polypeptide sequence
MTQDELYMKEAIKEAKKAEEKGEVPIGAVLVINGEIIARAHNLRETEQRSIAHAEMLVIDEACKALGTWRLEGATLYVTLEPCPMCAGAVVLSRVEKVVFGAFDPKGGCSGTLMNLLQEERFNHQAEVVSGVLEEECGGMLSAFFRELRKKKKAARKNLSE

SEQ ID NO: 315 - protein, 183 aa, Salmonella enterica
  REGION 1..183: note = MISC_FEATURE - TadA polypeptide sequence
  source 1..183: note = serovar Typhimurium
MPPAFITGVTSLSDVELDHEYWMRHALTLAKRAWDEREVPVGAVLVHNHRVIGEGWNRPIGRHDPTAHAEIMALRQGGLVLQNYRLLDTTLYVTLEPCVMCAGAMVHSRIGRVVFGARDAKTGAAGSLIDVLHHPGMNHRVEIIEGVLRDECATLLSDFFRMRRQEIKALKKADRAEGAGPAV

SEQ ID NO: 316 - protein, 164 aa, Shewanella putrefaciens
  REGION 1..164: note = MISC_FEATURE - TadA polypeptide sequence
MDEYWMQVAMQMAEKAEAAGEVPVGAVLVKDGQQIATGYNLSISQHDPTAHAEILCLRSAGKKLENYRLLDATLYITLEPCAMCAGAMVHSRIARVVYGARDEKTGAAGTVVNLLQHPAFNHQVEVTSGVLAEACSAQLSRFFKRRRDEKKALKLAQRAQQGIE

SEQ ID NO: 317 - protein, 173 aa, Haemophilus influenzae
  REGION 1..173: note = MISC_FEATURE - TadA polypeptide sequence
MDAAKVRSEFDEKMMRYALELADKAEALGEIPVGAVLVDDARNIIGEGWNLSIVQSDPTAHAEIIALRNGAKNIQNYRLLNSTLYVTLEPCTMCAGAILHSRIKRLVFGASDYKTGAIGSRFHFFDDYKMNHTLEITSGVLAEECSQKLSTFFQKRREEKKIEKALLKSLSDK

SEQ ID NO: 318 - protein, 161 aa, Caulobacter crescentus
  REGION 1..161: note = MISC_FEATURE - TadA polypeptide sequence
MRTDESEDQDHRMMRLALDAARAAAEAGETPVGAVILDPSTGEVIATAGNGPIAAHDPTAHAEIAAMRAAAAKLGNYRLTDLTLVVTLEPCAMCAGAISHARIGRVVFGADDPKGGAVVHGPKFFAQPTCHWRPEVTGGVLADESADLLRGFFRARRKAKI

SEQ ID NO: 319 - protein, 179 aa, Geobacter sulfurreducens
  REGION 1..179: note = MISC_FEATURE - TadA polypeptide sequence
MSSLKKTPIRDDAYWMGKAIREAAKAAARDEVPIGAVIVRDGAVIGRGHNLREGSNDPSAHAEMIAIRQAARRSANWRLTGATLYVTLEPCLMCMGAIILARLERVVFGCYDPKGGAAGSLYDLSADPRLNHQVRLSPGVCQEECGTMLSDFFRDLRRRKKAKATPALFIDERKVPPEP

SEQ ID NO: 320 - protein, 167 aa, synthetic construct
  REGION 1..167: note = Description of artificial sequence: TadA*8 polypeptide sequence
MSEVEFSHEYWMRHALTLAKRARDEREVPVGAVLVLNNRVIGEGWNRAIGLHDPTAHAEIMALRQGGLVMQNYRLIDATLYVTFEPCVMCAGAMIHSRIGRVVFGVRNAKTGAAGSLMDVLHYPGMNHRVEITEGILADECAALLCTFFRMPRQVFNAQKKAQSSTD

SEQ ID NO: 321 - RNA, 80 nt, synthetic construct
  misc_feature 1..80: note = Description of artificial sequence: gRNA scaffold polynucleotide sequence
  source 1..80: mol_type = other RNA
gttttagagctagaaatagcaagttaaaataaggctagtccgttatcaacttgaaaaagtggcaccgagtcggtgctttt

SEQ ID NO: 322 - RNA, 125 nt, synthetic construct
  misc_feature 1..125: note = Description of artificial sequence: gRNA scaffold polynucleotide sequence
  source 1..125: mol_type = other RNA
gtttttgtactctcaagatttaagtaactgtacaacgaaacttacacagttacttaaatcttgcagaagctacaaagataaggcttcatgccgaaatcaacaccctgtcattttatggcagggtg

SEQ ID NO: 323 - RNA, 76 nt, Streptococcus pyogenes
  misc_feature 1..76: note = S. pyogenes gRNA scaffold ologonucleotide sequence
  source 1..76: mol_type = other RNA
gttttagagctagaaatagcaagttaaaataaggctagtccgttatcaacttgaaaaagtggcaccgagtcggtgc

SEQ ID NO: 324 - RNA, 84 nt, Staphylococcus aureus
  misc_feature 1..84: note = S. aureus gRNA scaffold oligonucleotide sequence
  source 1..84: mol_type = other RNA
gttttagtactctgtaatgaaaattacagaatctactaaaacaaggcaaaatgccgtgtttatctcgtcaacttgttggcgaga

SEQ ID NO: 325 - RNA, 97 nt, Bacillus hisashii
  misc_feature 1..97: note = BhCas12b gRNA scaffold oligonucleotide sequence
  source 1..97: mol_type = other RNA
gttctgtcttttggtcaggacaaccgtctagctataagtgctgcagggtgtgagaaactcctattgctggacgatgtctcttacgaggcattagcac

SEQ ID NO: 326 - RNA, 88 nt, Bacillus sp.
  misc_feature 1..88: note = BvCas12b gRNA scaffold oligonucleotide sequence
  source 1..88: mol_type = other RNA
gacctatagggtcaatgaatctgtgcgtgtgccataagtaattaaaaattacccaccacaggagcacctgaaaacaggtgcttggcac

SEQ ID NO: 327 - RNA, 80 nt, synthetic construct
  misc_feature 1..80: note = Description of artificial sequence: gRNA scaffold nucleotide sequence; oligonucleotide sequence
  modified_base 78..80: mod_base = um
  misc_feature 78..80: note = In embodiments, a nucleotide(s) is linked to the preceding 5' nucleotide by a 3' phosphorothioate internucleotide liknage
  source 1..80: mol_type = other RNA
gttttagagctagaaatagcaagttaaaataaggctagtccgttatcaacttgaaaaagtgggaccgagtcggtgctttt

SEQ ID NO: 328 - RNA, 80 nt, synthetic construct; identical to SEQ ID NO: 321
  misc_feature 1..80: note = Description of artificial sequence: gRNA scaffold nucleotide sequence
  misc_feature 78..80: note = In embodiments, a nucleotide(s) is linked to the preceding 5' nucleotide by a 3' phosphorothioate internucleotide liknage
  modified_base 78..80: mod_base = um
  source 1..80: mol_type = other RNA

SEQ ID NO: 329 - RNA, 117 nt, Bacillus hisashii
  misc_feature 1..117: note = BhCas12b gRNA scaffold + guide sequence; oligonucleotide sequence
  misc_feature 1..97: note = BhCas12b sgRNA scaffold
  source 1..117: mol_type = other RNA
gttctgtcttttggtcaggacaaccgtctagctataagtgctgcagggtgtgagaaactcctattgctggacgatgtctcttacgaggcattagcacnnnnnnnnnnnnnnnnnnnn

SEQ ID NO: 330 - RNA, 108 nt, Bacillus sp.
  misc_feature 1..108: note = BvCas12b gRNA scaffold + guide sequence; oligonucleotide sequence
  misc_feature 1..88: note = BvCas12b gRNA scaffold
  source 1..108: mol_type = other RNA
gacctatagggtcaatgaatctgtgcgtgtgccataagtaattaaaaattacccaccacaggagcacctgaaaacaggtgcttggcacnnnnnnnnnnnnnnnnnnnn

SEQ ID NO: 331 - RNA, 119 nt, Alicyclobacillus acidiphilus
  misc_feature 1..119: note = AaCas12b gRNA scaffold + guide sequence; oligonucleotide sequence
  misc_feature 1..99: note = AaCas12b gRNA scaffold
  source 1..119: mol_type = other RNA
gtctaaaggacagaatttttcaacgggtgtgccaatggccactttccaggtggcaaagcccgttgaacttctcaaaaagaacgatctgagaagtggcacnnnnnnnnnnnnnnnnnnnn

SEQ ID NO: 332 - protein, 29 aa, synthetic construct
  REGION 1..29: note = Description of artificial sequence: synthetic polypeptide sequence
PKKKRKVEGADKRTADGSEFESPKKKRKV

SEQ ID NO: 333 - protein, 23 aa, synthetic construct
  REGION 1..23: note = Description of artificial sequence: synthetic peptide sequence
RKSGKIAAIVVKRPRKPKKKRKV

SEQ ID NO: 334 - protein, 8 aa, synthetic construct
  REGION 1..8: note = Description of artificial sequence: synthetic peptide sequence
SGGSSGGS

SEQ ID NO: 335 - protein, 1609 aa, synthetic construct
  REGION 1..1609: note = Description of artificial sequence: pNMG-B335 ABE8.1_Y147T_CP5_NGC PAM_monomer polypeptide sequence
MSEVEFSHEYWMRHALTLAKRARDEREVPVGAVLVLNNRVIGEGWNRAIGLHDPTAHAEIMALRQGGLVMQNYRLIDATLYVTFEPCVMCAGAMIHSRIGRVVFGVRNAKTGAAGSLMDVLHYPGMNHRVEITEGILADECAALLCTFFRMPRQVFNAQKKAQSSTDSGGSSGGSSGSETPGTSESATPESSGGSSGGSEIGKATAKYFFYSNIMNFFKTEITLANGEIRKRPLIETNGETGEIVWDKGRDFATVRKVLSMPQVNIVKKTEVQTGGFSKESILPKRNSDKLIARKKDWDPKKYGGFMQPTVAYSVLVVAKVEKGKSKKLKSVKELLGITIMERSSFEKNPIDFLEAKGYKEVKKDLIIKLPKYSLFELENGRKRMLASAKFLQKGNELALPSKYVNFLYLASHYEKLKGSPEDNEQKQLFVEQHKHYLDEIIEQISEFSKRVILADANLDKVLSAYNKHRDKPIREQAENIIHLFTLTNLGAPRAFKYFDTTIARKEYRSTKEVLDATLIHQSITGLYETRIDLSQLGGDGGSGGSGGSGGSGGSGGSGGMDKKYSIGLAIGTNSVGWAVITDEYKVPSKKFKVLGNTDRHSIKKNLIGALLFDSGETAEATRLKRTARRRYTRRKNRICYLQEIFSNEMAKVDDSFFHRLEESFLVEEDKKHERHPIFGNIVDEVAYHEKYPTIYHLRKKLVDSTDKADLRLIYLALAHMIKFRGHFLIEGDLNPDNSDVDKLFIQLVQTYNQLFEENPINASGVDAKAILSARLSKSRRLENLIAQLPGEKKNGLFGNLIALSLGLTPNFKSNFDLAEDAKLQLSKDTYDDDLDNLLAQIGDQYADLFLAAKNLSDAILLSDILRVNTEITKAPLSASMIKRYDEHHQDLTLLKALVRQQLPEKYKEIFFDQSKNGYAGYIDGGASQEEFYKFIKPILEKMDGTEELLVKLNREDLLRKQRTFDNGSIPHQIHLGELHAILRRQEDFYPFLKDNREKIEKILTFRIPYYVGPLARGNSRFAWMTRKSEETITPWNFEEVVDKGASAQSFIERMTNFDKNLPNEKVLPKHSLLYEYFTVYNELTKVKYVTEGMRKPAFLSGEQKKAIVDLLFKTNRKVTVKQLKEDYFKKIECFDSVEISGVEDRFNASLGTYHDLLKIIKDKDFLDNEENEDILEDIVLTLTLFEDREMIEERLKTYAHLFDDKVMKQLKRRRYTGWGRLSRKLINGIRDKQSGKTILDFLKSDGFANRNFMQLIHDDSLTFKEDIQKAQVSGQGDSLHEHIANLAGSPAIKKGILQTVKVVDELVKVMGRHKPENIVIEMARENQTTQKGQKNSRERMKRIEEGIKELGSQILKEHPVENTQLQNEKLYLYYLQNGRDMYVDQELDINRLSDYDVDHIVPQSFLKDDSIDNKVLTRSDKNRGKSDNVPSEEVVKKMKNYWRQLLNAKLITQRKFDNLTKAERGGLSELDKAGFIKRQLVETRQITKHVAQILDSRMNTKYDENDKLIREVKVITLKSKLVSDFRKDFQFYKVREINNYHHAHDAYLNAVVGTALIKKYPKLESEFVYGDYKVYDVRKMIAKSEQEGADKRTADGSEFESPKKKRKV

SEQ ID NO: 336 - protein, 1807 aa, synthetic construct
  REGION 1..1807: note = Description of artificial sequence: pNMG-357_ABE8.14 with NGC PAM CP5 polypeptide sequence
  REGION 1..174: note = MISC_FEATURE - Adenosine deaminase sequence
  REGION 175..198: note = MISC_FEATURE - Linker sequence
  REGION 199..365: note = MISC_FEATURE - Adenosine deaminase sequence
  REGION 366..397: note = MISC_FEATURE - Linker sequence
  REGION 398..738: note = MISC_FEATURE - Sequence derived from Cas9
  REGION 739..759: note = MISC_FEATURE - Linker sequence
  REGION 760..1785: note = MISC_FEATURE - Sequence derived from Cas9
  REGION 1786..1807: note = MISC_FEATURE - Bipartite nuclear localization sequence
MSEVEFSHEYWMRHALTLAKRAWDEREVPVGAVLVHNNRVIGEGWNRPIGRHDPTAHAEIMALRQGGLVMQNYRLIDATLYVTLEPCVMCAGAMIHSRIGRVVFGARDAKTGAAGSLMDVLHHPGMNHRVEITEGILADECAALLSDFFRMRRQEIKAQKKAQSSTDGGSSGGSSGSETPGTSESATPESSGGSSGGSMSEVEFSHEYWMRHALTLAKRARDEREVPVGAVLVLNNRVIGEGWNRAIGLHDPTAHAEIMALRQGGLVMQNYRLIDATLYVTFEPCVMCAGAMIHSRIGRVVFGVRNAKTGAAGSLMDVLHYPGMNHRVEITEGILADECAALLCTFFRMPRQVFNAQKKAQSSTDSGGSSGGSSGSETPGTSESATPESSGGSSGGSEIGKATAKYFFYSNIMNFFKTEITLANGEIRKRPLIETNGETGEIVWDKGRDFATVRKVLSMPQVNIVKKTEVQTGGFSKESILPKRNSDKLIARKKDWDPKKYGGFMQPTVAYSVLVVAKVEKGKSKKLKSVKELLGITIMERSSFEKNPIDFLEAKGYKEVKKDLIIKLPKYSLFELENGRKRMLASAKFLQKGNELALPSKYVNFLYLASHYEKLKGSPEDNEQKQLFVEQHKHYLDEIIEQISEFSKRVILADANLDKVLSAYNKHRDKPIREQAENIIHLFTLTNLGAPRAFKYFDTTIARKEYRSTKEVLDATLIHQSITGLYETRIDLSQLGGDGGSGGSGGSGGSGGSGGSGGMDKKYSIGLAIGTNSVGWAVITDEYKVPSKKFKVLGNTDRHSIKKNLIGALLFDSGETAEATRLKRTARRRYTRRKNRICYLQEIFSNEMAKVDDSFFHRLEESFLVEEDKKHERHPIFGNIVDEVAYHEKYPTIYHLRKKLVDSTDKADLRLIYLALAHMIKFRGHFLIEGDLNPDNSDVDKLFIQLVQTYNQLFEENPINASGVDAKAILSARLSKSRRLENLIAQLPGEKKNGLFGNLIALSLGLTPNFKSNFDLAEDAKLQLSKDTYDDDLDNLLAQIGDQYADLFLAAKNLSDAILLSDILRVNTEITKAPLSASMIKRYDEHHQDLTLLKALVRQQLPEKYKEIFFDQSKNGYAGYIDGGASQEEFYKFIKPILEKMDGTEELLVKLNREDLLRKQRTFDNGSIPHQIHLGELHAILRRQEDFYPFLKDNREKIEKILTFRIPYYVGPLARGNSRFAWMTRKSEETITPWNFEEVVDKGASAQSFIERMTNFDKNLPNEKVLPKHSLLYEYFTVYNELTKVKYVTEGMRKPAFLSGEQKKAIVDLLFKTNRKVTVKQLKEDYFKKIECFDSVEISGVEDRFNASLGTYHDLLKIIKDKDFLDNEENEDILEDIVLTLTLFEDREMIEERLKTYAHLFDDKVMKQLKRRRYTGWGRLSRKLINGIRDKQSGKTILDFLKSDGFANRNFMQLIHDDSLTFKEDIQKAQVSGQGDSLHEHIANLAGSPAIKKGILQTVKVVDELVKVMGRHKPENIVIEMARENQTTQKGQKNSRERMKRIEEGIKELGSQILKEHPVENTQLQNEKLYLYYLQNGRDMYVDQELDINRLSDYDVDHIVPQSFLKDDSIDNKVLTRSDKNRGKSDNVPSEEVVKKMKNYWRQLLNAKLITQRKFDNLTKAERGGLSELDKAGFIKRQLVETRQITKHVAQILDSRMNTKYDENDKLIREVKVITLKSKLVSDFRKDFQFYKVREINNYHHAHDAYLNAVVGTALIKKYPKLESEFVYGDYKVYDVRKMIAKSEQEGADKRTADGSEFESPKKKRKV

SEQ ID NO: 337 - protein, 1588 aa, synthetic construct
  REGION 1..1588: note = Description of artificial sequence: ABE8.8-m polypeptide sequence
  REGION 1..167: note = MISC_FEATURE - Adenosine deaminase sequence
  REGION 168..199: note = MISC_FEATURE - Linker sequence
  REGION 200..1566: note = MISC_FEATURE - Sequence derived from Cas9
  REGION 1567..1588: note = MISC_FEATURE - Bipartite nuclear localization sequence
MSEVEFSHEYWMRHALTLAKRARDEREVPVGAVLVLNNRVIGEGWNRAIGLHDPTAHAEIMALRQGGLVMQNYRLIDATLYVTFEPCVMCAGAMIHSRIGRVVFGVRNAKTGAAGSLMDVLHHPGMNHRVEITEGILADECAALLCRFFRMPRRVFNAQKKAQSSTDSGGSSGGSSGSETPGTSESATPESSGGSSGGSDKKYSIGLAIGTNSVGWAVITDEYKVPSKKFKVLGNTDRHSIKKNLIGALLFDSGETAEATRLKRTARRRYTRRKNRICYLQEIFSNEMAKVDDSFFHRLEESFLVEEDKKHERHPIFGNIVDEVAYHEKYPTIYHLRKKLVDSTDKADLRLIYLALAHMIKFRGHFLIEGDLNPDNSDVDKLFIQLVQTYNQLFEENPINASGVDAKAILSARLSKSRRLENLIAQLPGEKKNGLFGNLIALSLGLTPNFKSNFDLAEDAKLQLSKDTYDDDLDNLLAQIGDQYADLFLAAKNLSDAILLSDILRVNTEITKAPLSASMIKRYDEHHQDLTLLKALVRQQLPEKYKEIFFDQSKNGYAGYIDGGASQEEFYKFIKPILEKMDGTEELLVKLNREDLLRKQRTFDNGSIPHQIHLGELHAILRRQEDFYPFLKDNREKIEKILTFRIPYYVGPLARGNSRFAWMTRKSEETITPWNFEEVVDKGASAQSFIERMTNFDKNLPNEKVLPKHSLLYEYFTVYNELTKVKYVTEGMRKPAFLSGEQKKAIVDLLFKTNRKVTVKQLKEDYFKKIECFDSVEISGVEDRFNASLGTYHDLLKIIKDKDFLDNEENEDILEDIVLTLTLFEDREMIEERLKTYAHLFDDKVMKQLKRRRYTGWGRLSRKLINGIRDKQSGKTILDFLKSDGFANRNFMQLIHDDSLTFKEDIQKAQVSGQGDSLHEHIANLAGSPAIKKGILQTVKVVDELVKVMGRHKPENIVIEMARENQTTQKGQKNSRERMKRIEEGIKELGSQILKEHPVENTQLQNEKLYLYYLQNGRDMYVDQELDINRLSDYDVDHIVPQSFLKDDSIDNKVLTRSDKNRGKSDNVPSEEVVKKMKNYWRQLLNAKLITQRKFDNLTKAERGGLSELDKAGFIKRQLVETRQITKHVAQILDSRMNTKYDENDKLIREVKVITLKSKLVSDFRKDFQFYKVREINNYHHAHDAYLNAVVGTALIKKYPKLESEFVYGDYKVYDVRKMIAKSEQEIGKATAKYFFYSNIMNFFKTEITLANGEIRKRPLIETNGETGEIVWDKGRDFATVRKVLSMPQVNIVKKTEVQTGGFSKESILPKRNSDKLIARKKDWDPKKYGGFDSPTVAYSVLVVAKVEKGKSKKLKSVKELLGITIMERSSFEKNPIDFLEAKGYKEVKKDLIIKLPKYSLFELENGRKRMLASAGELQKGNELALPSKYVNFLYLASHYEKLKGSPEDNEQKQLFVEQHKHYLDEIIEQISEFSKRVILADANLDKVLSAYNKHRDKPIREQAENIIHLFTLTNLGAPAAFKYFDTTIDRKRYTSTKEVLDATLIHQSITGLYETRIDLSQLGGDEGADKRTADGSEFESPKKKRKV

SEQ ID NO: 338 - protein, 1786 aa, synthetic construct
  REGION 1..1786: note = Description of artificial sequence: ABE8.8-d polypeptide sequence
  REGION 1..167: note = MISC_FEATURE - Adenosine deaminase sequence
  REGION 168..199: note = MISC_FEATURE - Linker sequence
  REGION 200..365: note = MISC_FEATURE - Adenosine deaminase sequence
  REGION 366..397: note = MISC_FEATURE - Linker sequence
  REGION 398..1764: note = MISC_FEATURE - Sequence derived from Cas9
  REGION 1765..1786: note = MISC_FEATURE - Bipartite nuclear localization sequence
MSEVEFSHEYWMRHALTLAKRAWDEREVPVGAVLVHNNRVIGEGWNRPIGRHDPTAHAEIMALRQGGLVMQNYRLIDATLYVTLEPCVMCAGAMIHSRIGRVVFGARDAKTGAAGSLMDVLHHPGMNHRVEITEGILADECAALLSDFFRMRRQEIKAQKKAQSSTDSGGSSGGSSGSETPGTSESATPESSGGSSGGSSEVEFSHEYWMRHALTLAKRARDEREVPVGAVLVLNNRVIGEGWNRAIGLHDPTAHAEIMALRQGGLVMQNYRLIDATLYVTFEPCVMCAGAMIHSRIGRVVFGVRNAKTGAAGSLMDVLHHPGMNHRVEITEGILADECAALLCRFFRMPRRVFNAQKKAQSSTDSGGSSGGSSGSETPGTSESATPESSGGSSGGSDKKYSIGLAIGTNSVGWAVITDEYKVPSKKFKVLGNTDRHSIKKNLIGALLFDSGETAEATRLKRTARRRYTRRKNRICYLQEIFSNEMAKVDDSFFHRLEESFLVEEDKKHERHPIFGNIVDEVAYHEKYPTIYHLRKKLVDSTDKADLRLIYLALAHMIKFRGHFLIEGDLNPDNSDVDKLFIQLVQTYNQLFEENPINASGVDAKAILSARLSKSRRLENLIAQLPGEKKNGLFGNLIALSLGLTPNFKSNFDLAEDAKLQLSKDTYDDDLDNLLAQIGDQYADLFLAAKNLSDAILLSDILRVNTEITKAPLSASMIKRYDEHHQDLTLLKALVRQQLPEKYKEIFFDQSKNGYAGYIDGGASQEEFYKFIKPILEKMDGTEELLVKLNREDLLRKQRTFDNGSIPHQIHLGELHAILRRQEDFYPFLKDNREKIEKILTFRIPYYVGPLARGNSRFAWMTRKSEETITPWNFEEVVDKGASAQSFIERMTNFDKNLPNEKVLPKHSLLYEYFTVYNELTKVKYVTEGMRKPAFLSGEQKKAIVDLLFKTNRKVTVKQLKEDYFKKIECFDSVEISGVEDRFNASLGTYHDLLKIIKDKDFLDNEENEDILEDIVLTLTLFEDREMIEERLKTYAHLFDDKVMKQLKRRRYTGWGRLSRKLINGIRDKQSGKTILDFLKSDGFANRNFMQLIHDDSLTFKEDIQKAQVSGQGDSLHEHIANLAGSPAIKKGILQTVKVVDELVKVMGRHKPENIVIEMARENQTTQKGQKNSRERMKRIEEGIKELGSQILKEHPVENTQLQNEKLYLYYLQNGRDMYVDQELDINRLSDYDVDHIVPQSFLKDDSIDNKVLTRSDKNRGKSDNVPSEEVVKKMKNYWRQLLNAKLITQRKFDNLTKAERGGLSELDKAGFIKRQLVETRQITKHVAQILDSRMNTKYDENDKLIREVKVITLKSKLVSDFRKDFQFYKVREINNYHHAHDAYLNAVVGTALIKKYPKLESEFVYGDYKVYDVRKMIAKSEQEIGKATAKYFFYSNIMNFFKTEITLANGEIRKRPLIETNGETGEIVWDKGRDFATVRKVLSMPQVNIVKKTEVQTGGFSKESILPKRNSDKLIARKKDWDPKKYGGFDSPTVAYSVLVVAKVEKGKSKKLKSVKELLGITIMERSSFEKNPIDFLEAKGYKEVKKDLIIKLPKYSLFELENGRKRMLASAGELQKGNELALPSKYVNFLYLASHYEKLKGSPEDNEQKQLFVEQHKHYLDEIIEQISEFSKRVILADANLDKVLSAYNKHRDKPIREQAENIIHLFTLTNLGAPAAFKYFDTTIDRKRYTSTKEVLDATLIHQSITGLYETRIDLSQLGGDEGADKRTADGSEFESPKKKRKV

SEQ ID NO: 339 - protein, 1588 aa, synthetic construct
  REGION 1..1588: note = Description of artificial sequence: ABE8.13-m polypeptide sequence
  REGION 1..167: note = MISC_FEATURE - Adenosine deaminase sequence
  REGION 168..199: note = MISC_FEATURE - Linker sequence
  REGION 200..1566: note = MISC_FEATURE - Sequence derived from Cas9
  REGION 1567..1588: note = MISC_FEATURE - Bipartite nuclear localization sequence
MSEVEFSHEYWMRHALTLAKRARDEREVPVGAVLVLNNRVIGEGWNRAIGLHDPTAHAEIMALRQGGLVMQNYRLYDATLYVTFEPCVMCAGAMIHSRIGRVVFGVRNAKTGAAGSLMDVLHHPGMNHRVEITEGILADECAALLCRFFRMPRRVFNAQKKAQSSTDSGGSSGGSSGSETPGTSESATPESSGGSSGGSDKKYSIGLAIGTNSVGWAVITDEYKVPSKKFKVLGNTDRHSIKKNLIGALLFDSGETAEATRLKRTARRRYTRRKNRICYLQEIFSNEMAKVDDSFFHRLEESFLVEEDKKHERHPIFGNIVDEVAYHEKYPTIYHLRKKLVDSTDKADLRLIYLALAHMIKFRGHFLIEGDLNPDNSDVDKLFIQLVQTYNQLFEENPINASGVDAKAILSARLSKSRRLENLIAQLPGEKKNGLFGNLIALSLGLTPNFKSNFDLAEDAKLQLSKDTYDDDLDNLLAQIGDQYADLFLAAKNLSDAILLSDILRVNTEITKAPLSASMIKRYDEHHQDLTLLKALVRQQLPEKYKEIFFDQSKNGYAGYIDGGASQEEFYKFIKPILEKMDGTEELLVKLNREDLLRKQRTFDNGSIPHQIHLGELHAILRRQEDFYPFLKDNREKIEKILTFRIPYYVGPLARGNSRFAWMTRKSEETITPWNFEEVVDKGASAQSFIERMTNFDKNLPNEKVLPKHSLLYEYFTVYNELTKVKYVTEGMRKPAFLSGEQKKAIVDLLFKTNRKVTVKQLKEDYFKKIECFDSVEISGVEDRFNASLGTYHDLLKIIKDKDFLDNEENEDILEDIVLTLTLFEDREMIEERLKTYAHLFDDKVMKQLKRRRYTGWGRLSRKLINGIRDKQSGKTILDFLKSDGFANRNFMQLIHDDSLTFKEDIQKAQVSGQGDSLHEHIANLAGSPAIKKGILQTVKVVDELVKVMGRHKPENIVIEMARENQTTQKGQKNSRERMKRIEEGIKELGSQILKEHPVENTQLQNEKLYLYYLQNGRDMYVDQELDINRLSDYDVDHIVPQSFLKDDSIDNKVLTRSDKNRGKSDNVPSEEVVKKMKNYWRQLLNAKLITQRKFDNLTKAERGGLSELDKAGFIKRQLVETRQITKHVAQILDSRMNTKYDENDKLIREVKVITLKSKLVSDFRKDFQFYKVREINNYHHAHDAYLNAVVGTALIKKYPKLESEFVYGDYKVYDVRKMIAKSEQEIGKATAKYFFYSNIMNFFKTEITLANGEIRKRPLIETNGETGEIVWDKGRDFATVRKVLSMPQVNIVKKTEVQTGGFSKESILPKRNSDKLIARKKDWDPKKYGGFDSPTVAYSVLVVAKVEKGKSKKLKSVKELLGITIMERSSFEKNPIDFLEAKGYKEVKKDLIIKLPKYSLFELENGRKRMLASAGELQKGNELALPSKYVNFLYLASHYEKLKGSPEDNEQKQLFVEQHKHYLDEIIEQISEFSKRVILADANLDKVLSAYNKHRDKPIREQAENIIHLFTLTNLGAPAAFKYFDTTIDRKRYTSTKEVLDATLIHQSITGLYETRIDLSQLGGDEGADKRTADGSEFESPKKKRKV

SEQ ID NO: 340 - protein, 1786 aa, synthetic construct
  REGION 1..1786: note = Description of artificial sequence: ABE8.13-d polypeptide sequence
  REGION 1..167: note = MISC_FEATURE - Adenosine deaminase sequence
  REGION 168..199: note = MISC_FEATURE - Linker sequence
  REGION 200..365: note = MISC_FEATURE - Adenosine deaminase sequence
  REGION 366..397: note = MISC_FEATURE - Linker sequence
  REGION 398..1764: note = MISC_FEATURE - Sequence derived from Cas9
  REGION 1765..1786: note = MISC_FEATURE - Bipartite nuclear localization sequence
MSEVEFSHEYWMRHALTLAKRAWDEREVPVGAVLVHNNRVIGEGWNRPIGRHDPTAHAEIMALRQGGLVMQNYRLIDATLYVTLEPCVMCAGAMIHSRIGRVVFGARDAKTGAAGSLMDVLHHPGMNHRVEITEGILADECAALLSDFFRMRRQEIKAQKKAQSSTDSGGSSGGSSGSETPGTSESATPESSGGSSGGSSEVEFSHEYWMRHALTLAKRARDEREVPVGAVLVLNNRVIGEGWNRAIGLHDPTAHAEIMALRQGGLVMQNYRLYDATLYVTFEPCVMCAGAMIHSRIGRVVFGVRNAKTGAAGSLMDVLHHPGMNHRVEITEGILADECAALLCRFFRMPRRVFNAQKKAQSSTDSGGSSGGSSGSETPGTSESATPESSGGSSGGSDKKYSIGLAIGTNSVGWAVITDEYKVPSKKFKVLGNTDRHSIKKNLIGALLFDSGETAEATRLKRTARRRYTRRKNRICYLQEIFSNEMAKVDDSFFHRLEESFLVEEDKKHERHPIFGNIVDEVAYHEKYPTIYHLRKKLVDSTDKADLRLIYLALAHMIKFRGHFLIEGDLNPDNSDVDKLFIQLVQTYNQLFEENPINASGVDAKAILSARLSKSRRLENLIAQLPGEKKNGLFGNLIALSLGLTPNFKSNFDLAEDAKLQLSKDTYDDDLDNLLAQIGDQYADLFLAAKNLSDAILLSDILRVNTEITKAPLSASMIKRYDEHHQDLTLLKALVRQQLPEKYKEIFFDQSKNGYAGYIDGGASQEEFYKFIKPILEKMDGTEELLVKLNREDLLRKQRTFDNGSIPHQIHLGELHAILRRQEDFYPFLKDNREKIEKILTFRIPYYVGPLARGNSRFAWMTRKSEETITPWNFEEVVDKGASAQSFIERMTNFDKNLPNEKVLPKHSLLYEYFTVYNELTKVKYVTEGMRKPAFLSGEQKKAIVDLLFKTNRKVTVKQLKEDYFKKIECFDSVEISGVEDRFNASLGTYHDLLKIIKDKDFLDNEENEDILEDIVLTLTLFEDREMIEERLKTYAHLFDDKVMKQLKRRRYTGWGRLSRKLINGIRDKQSGKTILDFLKSDGFANRNFMQLIHDDSLTFKEDIQKAQVSGQGDSLHEHIANLAGSPAIKKGILQTVKVVDELVKVMGRHKPENIVIEMARENQTTQKGQKNSRERMKRIEEGIKELGSQILKEHPVENTQLQNEKLYLYYLQNGRDMYVDQELDINRLSDYDVDHIVPQSFLKDDSIDNKVLTRSDKNRGKSDNVPSEEVVKKMKNYWRQLLNAKLITQRKFDNLTKAERGGLSELDKAGFIKRQLVETRQITKHVAQILDSRMNTKYDENDKLIREVKVITLKSKLVSDFRKDFQFYKVREINNYHHAHDAYLNAVVGTALIKKYPKLESEFVYGDYKVYDVRKMIAKSEQEIGKATAKYFFYSNIMNFFKTEITLANGEIRKRPLIETNGETGEIVWDKGRDFATVRKVLSMPQVNIVKKTEVQTGGFSKESILPKRNSDKLIARKKDWDPKKYGGFDSPTVAYSVLVVAKVEKGKSKKLKSVKELLGITIMERSSFEKNPIDFLEAKGYKEVKKDLIIKLPKYSLFELENGRKRMLASAGELQKGNELALPSKYVNFLYLASHYEKLKGSPEDNEQKQLFVEQHKHYLDEIIEQISEFSKRVILADANLDKVLSAYNKHRDKPIREQAENIIHLFTLTNLGAPAAFKYFDTTIDRKRYTSTKEVLDATLIHQSITGLYETRIDLSQLGGDEGADKRTADGSEFESPKKKRKV

SEQ ID NO: 341 - protein, 1588 aa, synthetic construct
  REGION 1..1588: note = Description of artificial sequence: ABE8.17-m polypeptide sequence
  REGION 1..167: note = MISC_FEATURE - Adenosine deaminase sequence
  REGION 168..199: note = MISC_FEATURE - Linker sequence
  REGION 200..1566: note = MISC_FEATURE - Sequence derived from Cas9
  REGION 1567..1588: note = MISC_FEATURE - Bipartite nuclear localization sequence
MSEVEFSHEYWMRHALTLAKRARDEREVPVGAVLVLNNRVIGEGWNRAIGLHDPTAHAEIMALRQGGLVMQNYRLIDATLYSTFEPCVMCAGAMIHSRIGRVVFGVRNAKTGAAGSLMDVLHYPGMNHRVEITEGILADECAALLCYFFRMPRRVFNAQKKAQSSTDSGGSSGGSSGSETPGTSESATPESSGGSSGGSDKKYSIGLAIGTNSVGWAVITDEYKVPSKKFKVLGNTDRHSIKKNLIGALLFDSGETAEATRLKRTARRRYTRRKNRICYLQEIFSNEMAKVDDSFFHRLEESFLVEEDKKHERHPIFGNIVDEVAYHEKYPTIYHLRKKLVDSTDKADLRLIYLALAHMIKFRGHFLIEGDLNPDNSDVDKLFIQLVQTYNQLFEENPINASGVDAKAILSARLSKSRRLENLIAQLPGEKKNGLFGNLIALSLGLTPNFKSNFDLAEDAKLQLSKDTYDDDLDNLLAQIGDQYADLFLAAKNLSDAILLSDILRVNTEITKAPLSASMIKRYDEHHQDLTLLKALVRQQLPEKYKEIFFDQSKNGYAGYIDGGASQEEFYKFIKPILEKMDGTEELLVKLNREDLLRKQRTFDNGSIPHQIHLGELHAILRRQEDFYPFLKDNREKIEKILTFRIPYYVGPLARGNSRFAWMTRKSEETITPWNFEEVVDKGASAQSFIERMTNFDKNLPNEKVLPKHSLLYEYFTVYNELTKVKYVTEGMRKPAFLSGEQKKAIVDLLFKTNRKVTVKQLKEDYFKKIECFDSVEISGVEDRFNASLGTYHDLLKIIKDKDFLDNEENEDILEDIVLTLTLFEDREMIEERLKTYAHLFDDKVMKQLKRRRYTGWGRLSRKLINGIRDKQSGKTILDFLKSDGFANRNFMQLIHDDSLTFKEDIQKAQVSGQGDSLHEHIANLAGSPAIKKGILQTVKVVDELVKVMGRHKPENIVIEMARENQTTQKGQKNSRERMKRIEEGIKELGSQILKEHPVENTQLQNEKLYLYYLQNGRDMYVDQELDINRLSDYDVDHIVPQSFLKDDSIDNKVLTRSDKNRGKSDNVPSEEVVKKMKNYWRQLLNAKLITQRKFDNLTKAERGGLSELDKAGFIKRQLVETRQITKHVAQILDSRMNTKYDENDKLIREVKVITLKSKLVSDFRKDFQFYKVREINNYHHAHDAYLNAVVGTALIKKYPKLESEFVYGDYKVYDVRKMIAKSEQEIGKATAKYFFYSNIMNFFKTEITLANGEIRKRPLIETNGETGEIVWDKGRDFATVRKVLSMPQVNIVKKTEVQTGGFSKESILPKRNSDKLIARKKDWDPKKYGGFDSPTVAYSVLVVAKVEKGKSKKLKSVKELLGITIMERSSFEKNPIDFLEAKGYKEVKKDLIIKLPKYSLFELENGRKRMLASAGELQKGNELALPSKYVNFLYLASHYEKLKGSPEDNEQKQLFVEQHKHYLDEIIEQISEFSKRVILADANLDKVLSAYNKHRDKPIREQAENIIHLFTLTNLGAPAAFKYFDTTIDRKRYTSTKEVLDATLIHQSITGLYETRIDLSQLGGDEGADKRTADGSEFESPKKKRKV

SEQ ID NO: 342 - protein, 1786 aa, synthetic construct
  REGION 1..1786: note = Description of artificial sequence: ABE8.17-d polypeptide sequence
  REGION 1..167: note = MISC_FEATURE - Adenosine deaminase sequence
  REGION 168..199: note = MISC_FEATURE - Linker sequence
  REGION 200..365: note = MISC_FEATURE - Adenosine deaminase sequence
  REGION 366..397: note = MISC_FEATURE - Linker sequence
  REGION 398..1764: note = MISC_FEATURE - Sequence derived from Cas9
  REGION 1765..1786: note = MISC_FEATURE - Bipartite nuclear localization sequence
MSEVEFSHEYWMRHALTLAKRAWDEREVPVGAVLVHNNRVIGEGWNRPIGRHDPTAHAEIMALRQGGLVMQNYRLIDATLYVTLEPCVMCAGAMIHSRIGRVVFGARDAKTGAAGSLMDVLHHPGMNHRVEITEGILADECAALLSDFFRMRRQEIKAQKKAQSSTDSGGSSGGSSGSETPGTSESATPESSGGSSGGSSEVEFSHEYWMRHALTLAKRARDEREVPVGAVLVLNNRVIGEGWNRAIGLHDPTAHAEIMALRQGGLVMQNYRLIDATLYSTFEPCVMCAGAMIHSRIGRVVFGVRNAKTGAAGSLMDVLHYPGMNHRVEITEGILADECAALLCYFFRMPRRVFNAQKKAQSSTDSGGSSGGSSGSETPGTSESATPESSGGSSGGSDKKYSIGLAIGTNSVGWAVITDEYKVPSKKFKVLGNTDRHSIKKNLIGALLFDSGETAEATRLKRTARRRYTRRKNRICYLQEIFSNEMAKVDDSFFHRLEESFLVEEDKKHERHPIFGNIVDEVAYHEKYPTIYHLRKKLVDSTDKADLRLIYLALAHMIKFRGHFLIEGDLNPDNSDVDKLFIQLVQTYNQLFEENPINASGVDAKAILSARLSKSRRLENLIAQLPGEKKNGLFGNLIALSLGLTPNFKSNFDLAEDAKLQLSKDTYDDDLDNLLAQIGDQYADLFLAAKNLSDAILLSDILRVNTEITKAPLSASMIKRYDEHHQDLTLLKALVRQQLPEKYKEIFFDQSKNGYAGYIDGGASQEEFYKFIKPILEKMDGTEELLVKLNREDLLRKQRTFDNGSIPHQIHLGELHAILRRQEDFYPFLKDNREKIEKILTFRIPYYVGPLARGNSRFAWMTRKSEETITPWNFEEVVDKGASAQSFIERMTNFDKNLPNEKVLPKHSLLYEYFTVYNELTKVKYVTEGMRKPAFLSGEQKKAIVDLLFKTNRKVTVKQLKEDYFKKIECFDSVEISGVEDRFNASLGTYHDLLKIIKDKDFLDNEENEDILEDIVLTLTLFEDREMIEERLKTYAHLFDDKVMKQLKRRRYTGWGRLSRKLINGIRDKQSGKTILDFLKSDGFANRNFMQLIHDDSLTFKEDIQKAQVSGQGDSLHEHIANLAGSPAIKKGILQTVKVVDELVKVMGRHKPENIVIEMARENQTTQKGQKNSRERMKRIEEGIKELGSQILKEHPVENTQLQNEKLYLYYLQNGRDMYVDQELDINRLSDYDVDHIVPQSFLKDDSIDNKVLTRSDKNRGKSDNVPSEEVVKKMKNYWRQLLNAKLITQRKFDNLTKAERGGLSELDKAGFIKRQLVETRQITKHVAQILDSRMNTKYDENDKLIREVKVITLKSKLVSDFRKDFQFYKVREINNYHHAHDAYLNAVVGTALIKKYPKLESEFVYGDYKVYDVRKMIAKSEQEIGKATAKYFFYSNIMNFFKTEITLANGEIRKRPLIETNGETGEIVWDKGRDFATVRKVLSMPQVNIVKKTEVQTGGFSKESILPKRNSDKLIARKKDWDPKKYGGFDSPTVAYSVLVVAKVEKGKSKKLKSVKELLGITIMERSSFEKNPIDFLEAKGYKEVKKDLIIKLPKYSLFELENGRKRMLASAGELQKGNELALPSKYVNFLYLASHYEKLKGSPEDNEQKQLFVEQHKHYLDEIIEQISEFSKRVILADANLDKVLSAYNKHRDKPIREQAENIIHLFTLTNLGAPAAFKYFDTTIDRKRYTSTKEVLDATLIHQSITGLYETRIDLSQLGGDEGADKRTADGSEFESPKKKRKV

SEQ ID NO: 343 - protein, 1588 aa, synthetic construct
  REGION 1..1588: note = Description of artificial sequence: ABE8.20-m polypeptide sequence
  REGION 1..167: note = MISC_FEATURE - Adenosine deaminse sequence
  REGION 168..199: note = MISC_FEATURE - Linker sequence
  REGION 200..1566: note = MISC_FEATURE - Sequence derived from Cas9
  REGION 1567..1588: note = MISC_FEATURE - Bipartite nuclear localization sequence
MSEVEFSHEYWMRHALTLAKRARDEREVPVGAVLVLNNRVIGEGWNRAIGLHDPTAHAEIMALRQGGLVMQNYRLYDATLYSTFEPCVMCAGAMIHSRIGRVVFGVRNAKTGAAGSLMDVLHHPGMNHRVEITEGILADECAALLCRFFRMPRRVFNAQKKAQSSTDSGGSSGGSSGSETPGTSESATPESSGGSSGGSDKKYSIGLAIGTNSVGWAVITDEYKVPSKKFKVLGNTDRHSIKKNLIGALLFDSGETAEATRLKRTARRRYTRRKNRICYLQEIFSNEMAKVDDSFFHRLEESFLVEEDKKHERHPIFGNIVDEVAYHEKYPTIYHLRKKLVDSTDKADLRLIYLALAHMIKFRGHFLIEGDLNPDNSDVDKLFIQLVQTYNQLFEENPINASGVDAKAILSARLSKSRRLENLIAQLPGEKKNGLFGNLIALSLGLTPNFKSNFDLAEDAKLQLSKDTYDDDLDNLLAQIGDQYADLFLAAKNLSDAILLSDILRVNTEITKAPLSASMIKRYDEHHQDLTLLKALVRQQLPEKYKEIFFDQSKNGYAGYIDGGASQEEFYKFIKPILEKMDGTEELLVKLNREDLLRKQRTFDNGSIPHQIHLGELHAILRRQEDFYPFLKDNREKIEKILTFRIPYYVGPLARGNSRFAWMTRKSEETITPWNFEEVVDKGASAQSFIERMTNFDKNLPNEKVLPKHSLLYEYFTVYNELTKVKYVTEGMRKPAFLSGEQKKAIVDLLFKTNRKVTVKQLKEDYFKKIECFDSVEISGVEDRFNASLGTYHDLLKIIKDKDFLDNEENEDILEDIVLTLTLFEDREMIEERLKTYAHLFDDKVMKQLKRRRYTGWGRLSRKLINGIRDKQSGKTILDFLKSDGFANRNFMQLIHDDSLTFKEDIQKAQVSGQGDSLHEHIANLAGSPAIKKGILQTVKVVDELVKVMGRHKPENIVIEMARENQTTQKGQKNSRERMKRIEEGIKELGSQILKEHPVENTQLQNEKLYLYYLQNGRDMYVDQELDINRLSDYDVDHIVPQSFLKDDSIDNKVLTRSDKNRGKSDNVPSEEVVKKMKNYWRQLLNAKLITQRKFDNLTKAERGGLSELDKAGFIKRQLVETRQITKHVAQILDSRMNTKYDENDKLIREVKVITLKSKLVSDFRKDFQFYKVREINNYHHAHDAYLNAVVGTALIKKYPKLESEFVYGDYKVYDVRKMIAKSEQEIGKATAKYFFYSNIMNFFKTEITLANGEIRKRPLIETNGETGEIVWDKGRDFATVRKVLSMPQVNIVKKTEVQTGGFSKESILPKRNSDKLIARKKDWDPKKYGGFDSPTVAYSVLVVAKVEKGKSKKLKSVKELLGITIMERSSFEKNPIDFLEAKGYKEVKKDLIIKLPKYSLFELENGRKRMLASAGELQKGNELALPSKYVNFLYLASHYEKLKGSPEDNEQKQLFVEQHKHYLDEIIEQISEFSKRVILADANLDKVLSAYNKHRDKPIREQAENIIHLFTLTNLGAPAAFKYFDTTIDRKRYTSTKEVLDATLIHQSITGLYETRIDLSQLGGDEGADKRTADGSEFESPKKKRKV

SEQ ID NO: 344 - protein, 1786 aa, synthetic construct
  REGION 1..1786: note = Description of artificial sequence: ABE8.20-d polypeptide sequence
  REGION 1..167: note = MISC_FEATURE - Adenosine deaminase sequence
  REGION 168..199: note = MISC_FEATURE - Linker sequence
  REGION 200..365: note = MISC_FEATURE - Adenosine deaminase sequence
  REGION 366..397: note = MISC_FEATURE - Linker sequence
  REGION 398..1764: note = MISC_FEATURE - Sequence derived from Cas9
  REGION 1765..1786: note = MISC_FEATURE - Bipartite nuclear localization sequence
MSEVEFSHEYWMRHALTLAKRAWDEREVPVGAVLVHNNRVIGEGWNRPIGRHDPTAHAEIMALRQGGLVMQNYRLIDATLYVTLEPCVMCAGAMIHSRIGRVVFGARDAKTGAAGSLMDVLHHPGMNHRVEITEGILADECAALLSDFFRMRRQEIKAQKKAQSSTDSGGSSGGSSGSETPGTSESATPESSGGSSGGSSEVEFSHEYWMRHALTLAKRARDEREVPVGAVLVLNNRVIGEGWNRAIGLHDPTAHAEIMALRQGGLVMQNYRLYDATLYSTFEPCVMCAGAMIHSRIGRVVFGVRNAKTGAAGSLMDVLHHPGMNHRVEITEGILADECAALLCRFFRMPRRVFNAQKKAQSSTDSGGSSGGSSGSETPGTSESATPESSGGSSGGSDKKYSIGLAIGTNSVGWAVITDEYKVPSKKFKVLGNTDRHSIKKNLIGALLFDSGETAEATRLKRTARRRYTRRKNRICYLQEIFSNEMAKVDDSFFHRLEESFLVEEDKKHERHPIFGNIVDEVAYHEKYPTIYHLRKKLVDSTDKADLRLIYLALAHMIKFRGHFLIEGDLNPDNSDVDKLFIQLVQTYNQLFEENPINASGVDAKAILSARLSKSRRLENLIAQLPGEKKNGLFGNLIALSLGLTPNFKSNFDLAEDAKLQLSKDTYDDDLDNLLAQIGDQYADLFLAAKNLSDAILLSDILRVNTEITKAPLSASMIKRYDEHHQDLTLLKALVRQQLPEKYKEIFFDQSKNGYAGYIDGGASQEEFYKFIKPILEKMDGTEELLVKLNREDLLRKQRTFDNGSIPHQIHLGELHAILRRQEDFYPFLKDNREKIEKILTFRIPYYVGPLARGNSRFAWMTRKSEETITPWNFEEVVDKGASAQSFIERMTNFDKNLPNEKVLPKHSLLYEYFTVYNELTKVKYVTEGMRKPAFLSGEQKKAIVDLLFKTNRKVTVKQLKEDYFKKIECFDSVEISGVEDRFNASLGTYHDLLKIIKDKDFLDNEENEDILEDIVLTLTLFEDREMIEERLKTYAHLFDDKVMKQLKRRRYTGWGRLSRKLINGIRDKQSGKTILDFLKSDGFANRNFMQLIHDDSLTFKEDIQKAQVSGQGDSLHEHIANLAGSPAIKKGILQTVKVVDELVKVMGRHKPENIVIEMARENQTTQKGQKNSRERMKRIEEGIKELGSQILKEHPVENTQLQNEKLYLYYLQNGRDMYVDQELDINRLSDYDVDHIVPQSFLKDDSIDNKVLTRSDKNRGKSDNVPSEEVVKKMKNYWRQLLNAKLITQRKFDNLTKAERGGLSELDKAGFIKRQLVETRQITKHVAQILDSRMNTKYDENDKLIREVKVITLKSKLVSDFRKDFQFYKVREINNYHHAHDAYLNAVVGTALIKKYPKLESEFVYGDYKVYDVRKMIAKSEQEIGKATAKYFFYSNIMNFFKTEITLANGEIRKRPLIETNGETGEIVWDKGRDFATVRKVLSMPQVNIVKKTEVQTGGFSKESILPKRNSDKLIARKKDWDPKKYGGFDSPTVAYSVLVVAKVEKGKSKKLKSVKELLGITIMERSSFEKNPIDFLEAKGYKEVKKDLIIKLPKYSLFELENGRKRMLASAGELQKGNELALPSKYVNFLYLASHYEKLKGSPEDNEQKQLFVEQHKHYLDEIIEQISEFSKRVILADANLDKVLSAYNKHRDKPIREQAENIIHLFTLTNLGAPAAFKYFDTTIDRKRYTSTKEVLDATLIHQSITGLYETRIDLSQLGGDEGADKRTADGSEFESPKKKRKV

SEQ ID NO: 345 - protein, 1588 aa, synthetic construct
  REGION 1..1588: note = Description of artificial sequence: 01. monoABE8.1_bpNLS + Y147T polypeptide sequence
MSEVEFSHEYWMRHALTLAKRARDEREVPVGAVLVLNNRVIGEGWNRAIGLHDPTAHAEIMALRQGGLVMQNYRLIDATLYVTFEPCVMCAGAMIHSRIGRVVFGVRNAKTGAAGSLMDVLHYPGMNHRVEITEGILADECAALLCTFFRMPRQVFNAQKKAQSSTDSGGSSGGSSGSETPGTSESATPESSGGSSGGSDKKYSIGLAIGTNSVGWAVITDEYKVPSKKFKVLGNTDRHSIKKNLIGALLFDSGETAEATRLKRTARRRYTRRKNRICYLQEIFSNEMAKVDDSFFHRLEESFLVEEDKKHERHPIFGNIVDEVAYHEKYPTIYHLRKKLVDSTDKADLRLIYLALAHMIKFRGHFLIEGDLNPDNSDVDKLFIQLVQTYNQLFEENPINASGVDAKAILSARLSKSRRLENLIAQLPGEKKNGLFGNLIALSLGLTPNFKSNFDLAEDAKLQLSKDTYDDDLDNLLAQIGDQYADLFLAAKNLSDAILLSDILRVNTEITKAPLSASMIKRYDEHHQDLTLLKALVRQQLPEKYKEIFFDQSKNGYAGYIDGGASQEEFYKFIKPILEKMDGTEELLVKLNREDLLRKQRTFDNGSIPHQIHLGELHAILRRQEDFYPFLKDNREKIEKILTFRIPYYVGPLARGNSRFAWMTRKSEETITPWNFEEVVDKGASAQSFIERMTNFDKNLPNEKVLPKHSLLYEYFTVYNELTKVKYVTEGMRKPAFLSGEQKKAIVDLLFKTNRKVTVKQLKEDYFKKIECFDSVEISGVEDRFNASLGTYHDLLKIIKDKDFLDNEENEDILEDIVLTLTLFEDREMIEERLKTYAHLFDDKVMKQLKRRRYTGWGRLSRKLINGIRDKQSGKTILDFLKSDGFANRNFMQLIHDDSLTFKEDIQKAQVSGQGDSLHEHIANLAGSPAIKKGILQTVKVVDELVKVMGRHKPENIVIEMARENQTTQKGQKNSRERMKRIEEGIKELGSQILKEHPVENTQLQNEKLYLYYLQNGRDMYVDQELDINRLSDYDVDHIVPQSFLKDDSIDNKVLTRSDKNRGKSDNVPSEEVVKKMKNYWRQLLNAKLITQRKFDNLTKAERGGLSELDKAGFIKRQLVETRQITKHVAQILDSRMNTKYDENDKLIREVKVITLKSKLVSDFRKDFQFYKVREINNYHHAHDAYLNAVVGTALIKKYPKLESEFVYGDYKVYDVRKMIAKSEQEIGKATAKYFFYSNIMNFFKTEITLANGEIRKRPLIETNGETGEIVWDKGRDFATVRKVLSMPQVNIVKKTEVQTGGFSKESILPKRNSDKLIARKKDWDPKKYGGFVSPTVAYSVLVVAKVEKGKSKKLKSVKELLGITIMERSSFEKNPIDFLEAKGYKEVKKDLIIKLPKYSLFELENGRKRMLASARELQKGNELALPSKYVNFLYLASHYEKLKGSPEDNEQKQLFVEQHKHYLDEIIEQISEFSKRVILADANLDKVLSAYNKHRDKPIREQAENIIHLFTLTNLGAPAAFKYFDTTIDRKQYRSTKEVLDATLIHQSITGLYETRIDLSQLGGDEGADKRTADGSEFESPKKKRKV

SEQ ID NO: 346 - protein, 1588 aa, synthetic construct
  REGION 1..1588: note = Description of artificial sequence: 02. monoABE8.1_bpNLS + Y147R polypeptide sequence
MSEVEFSHEYWMRHALTLAKRARDEREVPVGAVLVLNNRVIGEGWNRAIGLHDPTAHAEIMALRQGGLVMQNYRLIDATLYVTFEPCVMCAGAMIHSRIGRVVFGVRNAKTGAAGSLMDVLHYPGMNHRVEITEGILADECAALLCRFFRMPRQVFNAQKKAQSSTDSGGSSGGSSGSETPGTSESATPESSGGSSGGSDKKYSIGLAIGTNSVGWAVITDEYKVPSKKFKVLGNTDRHSIKKNLIGALLFDSGETAEATRLKRTARRRYTRRKNRICYLQEIFSNEMAKVDDSFFHRLEESFLVEEDKKHERHPIFGNIVDEVAYHEKYPTIYHLRKKLVDSTDKADLRLIYLALAHMIKFRGHFLIEGDLNPDNSDVDKLFIQLVQTYNQLFEENPINASGVDAKAILSARLSKSRRLENLIAQLPGEKKNGLFGNLIALSLGLTPNFKSNFDLAEDAKLQLSKDTYDDDLDNLLAQIGDQYADLFLAAKNLSDAILLSDILRVNTEITKAPLSASMIKRYDEHHQDLTLLKALVRQQLPEKYKEIFFDQSKNGYAGYIDGGASQEEFYKFIKPILEKMDGTEELLVKLNREDLLRKQRTFDNGSIPHQIHLGELHAILRRQEDFYPFLKDNREKIEKILTFRIPYYVGPLARGNSRFAWMTRKSEETITPWNFEEVVDKGASAQSFIERMTNFDKNLPNEKVLPKHSLLYEYFTVYNELTKVKYVTEGMRKPAFLSGEQKKAIVDLLFKTNRKVTVKQLKEDYFKKIECFDSVEISGVEDRFNASLGTYHDLLKIIKDKDFLDNEENEDILEDIVLTLTLFEDREMIEERLKTYAHLFDDKVMKQLKRRRYTGWGRLSRKLINGIRDKQSGKTILDFLKSDGFANRNFMQLIHDDSLTFKEDIQKAQVSGQGDSLHEHIANLAGSPAIKKGILQTVKVVDELVKVMGRHKPENIVIEMARENQTTQKGQKNSRERMKRIEEGIKELGSQILKEHPVENTQLQNEKLYLYYLQNGRDMYVDQELDINRLSDYDVDHIVPQSFLKDDSIDNKVLTRSDKNRGKSDNVPSEEVVKKMKNYWRQLLNAKLITQRKFDNLTKAERGGLSELDKAGFIKRQLVETRQITKHVAQILDSRMNTKYDENDKLIREVKVITLKSKLVSDFRKDFQFYKVREINNYHHAHDAYLNAVVGTALIKKYPKLESEFVYGDYKVYDVRKMIAKSEQEIGKATAKYFFYSNIMNFFKTEITLANGEIRKRPLIETNGETGEIVWDKGRDFATVRKVLSMPQVNIVKKTEVQTGGFSKESILPKRNSDKLIARKKDWDPKKYGGFVSPTVAYSVLVVAKVEKGKSKKLKSVKELLGITIMERSSFEKNPIDFLEAKGYKEVKKDLIIKLPKYSLFELENGRKRMLASARELQKGNELALPSKYVNFLYLASHYEKLKGSPEDNEQKQLFVEQHKHYLDEIIEQISEFSKRVILADANLDKVLSAYNKHRDKPIREQAENIIHLFTLTNLGAPAAFKYFDTTIDRKQYRSTKEVLDATLIHQSITGLYETRIDLSQLGGDEGADKRTADGSEFESPKKKRKV

SEQ ID NO: 347 - protein, 1588 aa, synthetic construct
  REGION 1..1588: note = Description of artificial sequence: 03. monoABE8.1_bpNLS + Q154S polypeptide sequence
MSEVEFSHEYWMRHALTLAKRARDEREVPVGAVLVLNNRVIGEGWNRAIGLHDPTAHAEIMALRQGGLVMQNYRLIDATLYVTFEPCVMCAGAMIHSRIGRVVFGVRNAKTGAAGSLMDVLHYPGMNHRVEITEGILADECAALLCYFFRMPRSVFNAQKKAQSSTDSGGSSGGSSGSETPGTSESATPESSGGSSGGSDKKYSIGLAIGTNSVGWAVITDEYKVPSKKFKVLGNTDRHSIKKNLIGALLFDSGETAEATRLKRTARRRYTRRKNRICYLQEIFSNEMAKVDDSFFHRLEESFLVEEDKKHERHPIFGNIVDEVAYHEKYPTIYHLRKKLVDSTDKADLRLIYLALAHMIKFRGHFLIEGDLNPDNSDVDKLFIQLVQTYNQLFEENPINASGVDAKAILSARLSKSRRLENLIAQLPGEKKNGLFGNLIALSLGLTPNFKSNFDLAEDAKLQLSKDTYDDDLDNLLAQIGDQYADLFLAAKNLSDAILLSDILRVNTEITKAPLSASMIKRYDEHHQDLTLLKALVRQQLPEKYKEIFFDQSKNGYAGYIDGGASQEEFYKFIKPILEKMDGTEELLVKLNREDLLRKQRTFDNGSIPHQIHLGELHAILRRQEDFYPFLKDNREKIEKILTFRIPYYVGPLARGNSRFAWMTRKSEETITPWNFEEVVDKGASAQSFIERMTNFDKNLPNEKVLPKHSLLYEYFTVYNELTKVKYVTEGMRKPAFLSGEQKKAIVDLLFKTNRKVTVKQLKEDYFKKIECFDSVEISGVEDRFNASLGTYHDLLKIIKDKDFLDNEENEDILEDIVLTLTLFEDREMIEERLKTYAHLFDDKVMKQLKRRRYTGWGRLSRKLINGIRDKQSGKTILDFLKSDGFANRNFMQLIHDDSLTFKEDIQKAQVSGQGDSLHEHIANLAGSPAIKKGILQTVKVVDELVKVMGRHKPENIVIEMARENQTTQKGQKNSRERMKRIEEGIKELGSQILKEHPVENTQLQNEKLYLYYLQNGRDMYVDQELDINRLSDYDVDHIVPQSFLKDDSIDNKVLTRSDKNRGKSDNVPSEEVVKKMKNYWRQLLNAKLITQRKFDNLTKAERGGLSELDKAGFIKRQLVETRQITKHVAQILDSRMNTKYDENDKLIREVKVITLKSKLVSDFRKDFQFYKVREINNYHHAHDAYLNAVVGTALIKKYPKLESEFVYGDYKVYDVRKMIAKSEQEIGKATAKYFFYSNIMNFFKTEITLANGEIRKRPLIETNGETGEIVWDKGRDFATVRKVLSMPQVNIVKKTEVQTGGFSKESILPKRNSDKLIARKKDWDPKKYGGFVSPTVAYSVLVVAKVEKGKSKKLKSVKELLGITIMERSSFEKNPIDFLEAKGYKEVKKDLIIKLPKYSLFELENGRKRMLASARELQKGNELALPSKYVNFLYLASHYEKLKGSPEDNEQKQLFVEQHKHYLDEIIEQISEFSKRVILADANLDKVLSAYNKHRDKPIREQAENIIHLFTLTNLGAPAAFKYFDTTIDRKQYRSTKEVLDATLIHQSITGLYETRIDLSQLGGDEGADKRTADGSEFESPKKKRKV

SEQ ID NO: 348 - protein, 1588 aa, synthetic construct
  REGION 1..1588: note = Description of artificial sequence: 04. monoABE8.1_bpNLS + Y123H polypeptide sequence
MSEVEFSHEYWMRHALTLAKRARDEREVPVGAVLVLNNRVIGEGWNRAIGLHDPTAHAEIMALRQGGLVMQNYRLIDATLYVTFEPCVMCAGAMIHSRIGRVVFGVRNAKTGAAGSLMDVLHHPGMNHRVEITEGILADECAALLCYFFRMPRQVFNAQKKAQSSTDSGGSSGGSSGSETPGTSESATPESSGGSSGGSDKKYSIGLAIGTNSVGWAVITDEYKVPSKKFKVLGNTDRHSIKKNLIGALLFDSGETAEATRLKRTARRRYTRRKNRICYLQEIFSNEMAKVDDSFFHRLEESFLVEEDKKHERHPIFGNIVDEVAYHEKYPTIYHLRKKLVDSTDKADLRLIYLALAHMIKFRGHFLIEGDLNPDNSDVDKLFIQLVQTYNQLFEENPINASGVDAKAILSARLSKSRRLENLIAQLPGEKKNGLFGNLIALSLGLTPNFKSNFDLAEDAKLQLSKDTYDDDLDNLLAQIGDQYADLFLAAKNLSDAILLSDILRVNTEITKAPLSASMIKRYDEHHQDLTLLKALVRQQLPEKYKEIFFDQSKNGYAGYIDGGASQEEFYKFIKPILEKMDGTEELLVKLNREDLLRKQRTFDNGSIPHQIHLGELHAILRRQEDFYPFLKDNREKIEKILTFRIPYYVGPLARGNSRFAWMTRKSEETITPWNFEEVVDKGASAQSFIERMTNFDKNLPNEKVLPKHSLLYEYFTVYNELTKVKYVTEGMRKPAFLSGEQKKAIVDLLFKTNRKVTVKQLKEDYFKKIECFDSVEISGVEDRFNASLGTYHDLLKIIKDKDFLDNEENEDILEDIVLTLTLFEDREMIEERLKTYAHLFDDKVMKQLKRRRYTGWGRLSRKLINGIRDKQSGKTILDFLKSDGFANRNFMQLIHDDSLTFKEDIQKAQVSGQGDSLHEHIANLAGSPAIKKGILQTVKVVDELVKVMGRHKPENIVIEMARENQTTQKGQKNSRERMKRIEEGIKELGSQILKEHPVENTQLQNEKLYLYYLQNGRDMYVDQELDINRLSDYDVDHIVPQSFLKDDSIDNKVLTRSDKNRGKSDNVPSEEVVKKMKNYWRQLLNAKLITQRKFDNLTKAERGGLSELDKAGFIKRQLVETRQITKHVAQILDSRMNTKYDENDKLIREVKVITLKSKLVSDFRKDFQFYKVREINNYHHAHDAYLNAVVGTALIKKYPKLESEFVYGDYKVYDVRKMIAKSEQEIGKATAKYFFYSNIMNFFKTEITLANGEIRKRPLIETNGETGEIVWDKGRDFATVRKVLSMPQVNIVKKTEVQTGGFSKESILPKRNSDKLIARKKDWDPKKYGGFVSPTVAYSVLVVAKVEKGKSKKLKSVKELLGITIMERSSFEKNPIDFLEAKGYKEVKKDLIIKLPKYSLFELENGRKRMLASARELQKGNELALPSKYVNFLYLASHYEKLKGSPEDNEQKQLFVEQHKHYLDEIIEQISEFSKRVILADANLDKVLSAYNKHRDKPIREQAENIIHLFTLTNLGAPAAFKYFDTTIDRKQYRSTKEVLDATLIHQSITGLYETRIDLSQLGGDEGADKRTADGSEFESPKKKRKV

SEQ ID NO: 349 - protein, 1588 aa, synthetic construct
  REGION 1..1588: note = Description of artificial sequence: 05. monoABE8.1_bpNLS + V82S polypeptide sequence
MSEVEFSHEYWMRHALTLAKRARDEREVPVGAVLVLNNRVIGEGWNRAIGLHDPTAHAEIMALRQGGLVMQNYRLIDATLYSTFEPCVMCAGAMIHSRIGRVVFGVRNAKTGAAGSLMDVLHYPGMNHRVEITEGILADECAALLCYFFRMPRQVFNAQKKAQSSTDSGGSSGGSSGSETPGTSESATPESSGGSSGGSDKKYSIGLAIGTNSVGWAVITDEYKVPSKKFKVLGNTDRHSIKKNLIGALLFDSGETAEATRLKRTARRRYTRRKNRICYLQEIFSNEMAKVDDSFFHRLEESFLVEEDKKHERHPIFGNIVDEVAYHEKYPTIYHLRKKLVDSTDKADLRLIYLALAHMIKFRGHFLIEGDLNPDNSDVDKLFIQLVQTYNQLFEENPINASGVDAKAILSARLSKSRRLENLIAQLPGEKKNGLFGNLIALSLGLTPNFKSNFDLAEDAKLQLSKDTYDDDLDNLLAQIGDQYADLFLAAKNLSDAILLSDILRVNTEITKAPLSASMIKRYDEHHQDLTLLKALVRQQLPEKYKEIFFDQSKNGYAGYIDGGASQEEFYKFIKPILEKMDGTEELLVKLNREDLLRKQRTFDNGSIPHQIHLGELHAILRRQEDFYPFLKDNREKIEKILTFRIPYYVGPLARGNSRFAWMTRKSEETITPWNFEEVVDKGASAQSFIERMTNFDKNLPNEKVLPKHSLLYEYFTVYNELTKVKYVTEGMRKPAFLSGEQKKAIVDLLFKTNRKVTVKQLKEDYFKKIECFDSVEISGVEDRFNASLGTYHDLLKIIKDKDFLDNEENEDILEDIVLTLTLFEDREMIEERLKTYAHLFDDKVMKQLKRRRYTGWGRLSRKLINGIRDKQSGKTILDFLKSDGFANRNFMQLIHDDSLTFKEDIQKAQVSGQGDSLHEHIANLAGSPAIKKGILQTVKVVDELVKVMGRHKPENIVIEMARENQTTQKGQKNSRERMKRIEEGIKELGSQILKEHPVENTQLQNEKLYLYYLQNGRDMYVDQELDINRLSDYDVDHIVPQSFLKDDSIDNKVLTRSDKNRGKSDNVPSEEVVKKMKNYWRQLLNAKLITQRKFDNLTKAERGGLSELDKAGFIKRQLVETRQITKHVAQILDSRMNTKYDENDKLIREVKVITLKSKLVSDFRKDFQFYKVREINNYHHAHDAYLNAVVGTALIKKYPKLESEFVYGDYKVYDVRKMIAKSEQEIGKATAKYFFYSNIMNFFKTEITLANGEIRKRPLIETNGETGEIVWDKGRDFATVRKVLSMPQVNIVKKTEVQTGGFSKESILPKRNSDKLIARKKDWDPKKYGGFVSPTVAYSVLVVAKVEKGKSKKLKSVKELLGITIMERSSFEKNPIDFLEAKGYKEVKKDLIIKLPKYSLFELENGRKRMLASARELQKGNELALPSKYVNFLYLASHYEKLKGSPEDNEQKQLFVEQHKHYLDEIIEQISEFSKRVILADANLDKVLSAYNKHRDKPIREQAENIIHLFTLTNLGAPAAFKYFDTTIDRKQYRSTKEVLDATLIHQSITGLYETRIDLSQLGGDEGADKRTADGSEFESPKKKRKV

SEQ ID NO: 350 - protein, 1588 aa, synthetic construct
  REGION 1..1588: note = Description of artificial sequence: 06. monoABE8.1_bpNLS + T166R polypeptide sequence
MSEVEFSHEYWMRHALTLAKRARDEREVPVGAVLVLNNRVIGEGWNRAIGLHDPTAHAEIMALRQGGLVMQNYRLIDATLYVTFEPCVMCAGAMIHSRIGRVVFGVRNAKTGAAGSLMDVLHYPGMNHRVEITEGILADECAALLCYFFRMPRQVFNAQKKAQSSRDSGGSSGGSSGSETPGTSESATPESSGGSSGGSDKKYSIGLAIGTNSVGWAVITDEYKVPSKKFKVLGNTDRHSIKKNLIGALLFDSGETAEATRLKRTARRRYTRRKNRICYLQEIFSNEMAKVDDSFFHRLEESFLVEEDKKHERHPIFGNIVDEVAYHEKYPTIYHLRKKLVDSTDKADLRLIYLALAHMIKFRGHFLIEGDLNPDNSDVDKLFIQLVQTYNQLFEENPINASGVDAKAILSARLSKSRRLENLIAQLPGEKKNGLFGNLIALSLGLTPNFKSNFDLAEDAKLQLSKDTYDDDLDNLLAQIGDQYADLFLAAKNLSDAILLSDILRVNTEITKAPLSASMIKRYDEHHQDLTLLKALVRQQLPEKYKEIFFDQSKNGYAGYIDGGASQEEFYKFIKPILEKMDGTEELLVKLNREDLLRKQRTFDNGSIPHQIHLGELHAILRRQEDFYPFLKDNREKIEKILTFRIPYYVGPLARGNSRFAWMTRKSEETITPWNFEEVVDKGASAQSFIERMTNFDKNLPNEKVLPKHSLLYEYFTVYNELTKVKYVTEGMRKPAFLSGEQKKAIVDLLFKTNRKVTVKQLKEDYFKKIECFDSVEISGVEDRFNASLGTYHDLLKIIKDKDFLDNEENEDILEDIVLTLTLFEDREMIEERLKTYAHLFDDKVMKQLKRRRYTGWGRLSRKLINGIRDKQSGKTILDFLKSDGFANRNFMQLIHDDSLTFKEDIQKAQVSGQGDSLHEHIANLAGSPAIKKGILQTVKVVDELVKVMGRHKPENIVIEMARENQTTQKGQKNSRERMKRIEEGIKELGSQILKEHPVENTQLQNEKLYLYYLQNGRDMYVDQELDINRLSDYDVDHIVPQSFLKDDSIDNKVLTRSDKNRGKSDNVPSEEVVKKMKNYWRQLLNAKLITQRKFDNLTKAERGGLSELDKAGFIKRQLVETRQITKHVAQILDSRMNTKYDENDKLIREVKVITLKSKLVSDFRKDFQFYKVREINNYHHAHDAYLNAVVGTALIKKYPKLESEFVYGDYKVYDVRKMIAKSEQEIGKATAKYFFYSNIMNFFKTEITLANGEIRKRPLIETNGETGEIVWDKGRDFATVRKVLSMPQVNIVKKTEVQTGGFSKESILPKRNSDKLIARKKDWDPKKYGGFVSPTVAYSVLVVAKVEKGKSKKLKSVKELLGITIMERSSFEKNPIDFLEAKGYKEVKKDLIIKLPKYSLFELENGRKRMLASARELQKGNELALPSKYVNFLYLASHYEKLKGSPEDNEQKQLFVEQHKHYLDEIIEQISEFSKRVILADANLDKVLSAYNKHRDKPIREQAENIIHLFTLTNLGAPAAFKYFDTTIDRKQYRSTKEVLDATLIHQSITGLYETRIDLSQLGGDEGADKRTADGSEFESPKKKRKV

SEQ ID NO: 351 - protein, 1588 aa, synthetic construct
  REGION 1..1588: note = Description of artificial sequence: 07. monoABE8.1_bpNLS + Q154R polypeptide sequence
MSEVEFSHEYWMRHALTLAKRARDEREVPVGAVLVLNNRVIGEGWNRAIGLHDPTAHAEIMALRQGGLVMQNYRLIDATLYVTFEPCVMCAGAMIHSRIGRVVFGVRNAKTGAAGSLMDVLHYPGMNHRVEITEGILADECAALLCYFFRMPRRVFNAQKKAQSSTDSGGSSGGSSGSETPGTSESATPESSGGSSGGSDKKYSIGLAIGTNSVGWAVITDEYKVPSKKFKVLGNTDRHSIKKNLIGALLFDSGETAEATRLKRTARRRYTRRKNRICYLQEIFSNEMAKVDDSFFHRLEESFLVEEDKKHERHPIFGNIVDEVAYHEKYPTIYHLRKKLVDSTDKADLRLIYLALAHMIKFRGHFLIEGDLNPDNSDVDKLFIQLVQTYNQLFEENPINASGVDAKAILSARLSKSRRLENLIAQLPGEKKNGLFGNLIALSLGLTPNFKSNFDLAEDAKLQLSKDTYDDDLDNLLAQIGDQYADLFLAAKNLSDAILLSDILRVNTEITKAPLSASMIKRYDEHHQDLTLLKALVRQQLPEKYKEIFFDQSKNGYAGYIDGGASQEEFYKFIKPILEKMDGTEELLVKLNREDLLRKQRTFDNGSIPHQIHLGELHAILRRQEDFYPFLKDNREKIEKILTFRIPYYVGPLARGNSRFAWMTRKSEETITPWNFEEVVDKGASAQSFIERMTNFDKNLPNEKVLPKHSLLYEYFTVYNELTKVKYVTEGMRKPAFLSGEQKKAIVDLLFKTNRKVTVKQLKEDYFKKIECFDSVEISGVEDRFNASLGTYHDLLKIIKDKDFLDNEENEDILEDIVLTLTLFEDREMIEERLKTYAHLFDDKVMKQLKRRRYTGWGRLSRKLINGIRDKQSGKTILDFLKSDGFANRNFMQLIHDDSLTFKEDIQKAQVSGQGDSLHEHIANLAGSPAIKKGILQTVKVVDELVKVMGRHKPENIVIEMARENQTTQKGQKNSRERMKRIEEGIKELGSQILKEHPVENTQLQNEKLYLYYLQNGRDMYVDQELDINRLSDYDVDHIVPQSFLKDDSIDNKVLTRSDKNRGKSDNVPSEEVVKKMKNYWRQLLNAKLITQRKFDNLTKAERGGLSELDKAGFIKRQLVETRQITKHVAQILDSRMNTKYDENDKLIREVKVITLKSKLVSDFRKDFQFYKVREINNYHHAHDAYLNAVVGTALIKKYPKLESEFVYGDYKVYDVRKMIAKSEQEIGKATAKYFFYSNIMNFFKTEITLANGEIRKRPLIETNGETGEIVWDKGRDFATVRKVLSMPQVNIVKKTEVQTGGFSKESILPKRNSDKLIARKKDWDPKKYGGFVSPTVAYSVLVVAKVEKGKSKKLKSVKELLGITIMERSSFEKNPIDFLEAKGYKEVKKDLIIKLPKYSLFELENGRKRMLASARELQKGNELALPSKYVNFLYLASHYEKLKGSPEDNEQKQLFVEQHKHYLDEIIEQISEFSKRVILADANLDKVLSAYNKHRDKPIREQAENIIHLFTLTNLGAPAAFKYFDTTIDRKQYRSTKEVLDATLIHQSITGLYETRIDLSQLGGDEGADKRTADGSEFESPKKKRKV

SEQ ID NO: 352 - protein, 1588 aa, synthetic construct
  REGION 1..1588: note = Description of artificial sequence: 08. monoABE8.1_bpNLS + Y147R_Q154R_Y123H polypeptide sequence
MSEVEFSHEYWMRHALTLAKRARDEREVPVGAVLVLNNRVIGEGWNRAIGLHDPTAHAEIMALRQGGLVMQNYRLIDATLYVTFEPCVMCAGAMIHSRIGRVVFGVRNAKTGAAGSLMDVLHHPGMNHRVEITEGILADECAALLCRFFRMPRRVFNAQKKAQSSTDSGGSSGGSSGSETPGTSESATPESSGGSSGGSDKKYSIGLAIGTNSVGWAVITDEYKVPSKKFKVLGNTDRHSIKKNLIGALLFDSGETAEATRLKRTARRRYTRRKNRICYLQEIFSNEMAKVDDSFFHRLEESFLVEEDKKHERHPIFGNIVDEVAYHEKYPTIYHLRKKLVDSTDKADLRLIYLALAHMIKFRGHFLIEGDLNPDNSDVDKLFIQLVQTYNQLFEENPINASGVDAKAILSARLSKSRRLENLIAQLPGEKKNGLFGNLIALSLGLTPNFKSNFDLAEDAKLQLSKDTYDDDLDNLLAQIGDQYADLFLAAKNLSDAILLSDILRVNTEITKAPLSASMIKRYDEHHQDLTLLKALVRQQLPEKYKEIFFDQSKNGYAGYIDGGASQEEFYKFIKPILEKMDGTEELLVKLNREDLLRKQRTFDNGSIPHQIHLGELHAILRRQEDFYPFLKDNREKIEKILTFRIPYYVGPLARGNSRFAWMTRKSEETITPWNFEEVVDKGASAQSFIERMTNFDKNLPNEKVLPKHSLLYEYFTVYNELTKVKYVTEGMRKPAFLSGEQKKAIVDLLFKTNRKVTVKQLKEDYFKKIECFDSVEISGVEDRFNASLGTYHDLLKIIKDKDFLDNEENEDILEDIVLTLTLFEDREMIEERLKTYAHLFDDKVMKQLKRRRYTGWGRLSRKLINGIRDKQSGKTILDFLKSDGFANRNFMQLIHDDSLTFKEDIQKAQVSGQGDSLHEHIANLAGSPAIKKGILQTVKVVDELVKVMGRHKPENIVIEMARENQTTQKGQKNSRERMKRIEEGIKELGSQILKEHPVENTQLQNEKLYLYYLQNGRDMYVDQELDINRLSDYDVDHIVPQSFLKDDSIDNKVLTRSDKNRGKSDNVPSEEVVKKMKNYWRQLLNAKLITQRKFDNLTKAERGGLSELDKAGFIKRQLVETRQITKHVAQILDSRMNTKYDENDKLIREVKVITLKSKLVSDFRKDFQFYKVREINNYHHAHDAYLNAVVGTALIKKYPKLESEFVYGDYKVYDVRKMIAKSEQEIGKATAKYFFYSNIMNFFKTEITLANGEIRKRPLIETNGETGEIVWDKGRDFATVRKVLSMPQVNIVKKTEVQTGGFSKESILPKRNSDKLIARKKDWDPKKYGGFVSPTVAYSVLVVAKVEKGKSKKLKSVKELLGITIMERSSFEKNPIDFLEAKGYKEVKKDLIIKLPKYSLFELENGRKRMLASARELQKGNELALPSKYVNFLYLASHYEKLKGSPEDNEQKQLFVEQHKHYLDEIIEQISEFSKRVILADANLDKVLSAYNKHRDKPIREQAENIIHLFTLTNLGAPAAFKYFDTTIDRKQYRSTKEVLDATLIHQSITGLYETRIDLSQLGGDEGADKRTADGSEFESPKKKRKV

SEQ ID NO: 353 - protein, 1588 aa, synthetic construct
  REGION 1..1588: note = Description of artificial sequence: 09. monoABE8.1_bpNLS + Y147R_Q154R_I76Y polypeptide sequence
MSEVEFSHEYWMRHALTLAKRARDEREVPVGAVLVLNNRVIGEGWNRAIGLHDPTAHAEIMALRQGGLVMQNYRLYDATLYVTFEPCVMCAGAMIHSRIGRVVFGVRNAKTGAAGSLMDVLHYPGMNHRVEITEGILADECAALLCRFFRMPRRVFNAQKKAQSSTDSGGSSGGSSGSETPGTSESATPESSGGSSGGSDKKYSIGLAIGTNSVGWAVITDEYKVPSKKFKVLGNTDRHSIKKNLIGALLFDSGETAEATRLKRTARRRYTRRKNRICYLQEIFSNEMAKVDDSFFHRLEESFLVEEDKKHERHPIFGNIVDEVAYHEKYPTIYHLRKKLVDSTDKADLRLIYLALAHMIKFRGHFLIEGDLNPDNSDVDKLFIQLVQTYNQLFEENPINASGVDAKAILSARLSKSRRLENLIAQLPGEKKNGLFGNLIALSLGLTPNFKSNFDLAEDAKLQLSKDTYDDDLDNLLAQIGDQYADLFLAAKNLSDAILLSDILRVNTEITKAPLSASMIKRYDEHHQDLTLLKALVRQQLPEKYKEIFFDQSKNGYAGYIDGGASQEEFYKFIKPILEKMDGTEELLVKLNREDLLRKQRTFDNGSIPHQIHLGELHAILRRQEDFYPFLKDNREKIEKILTFRIPYYVGPLARGNSRFAWMTRKSEETITPWNFEEVVDKGASAQSFIERMTNFDKNLPNEKVLPKHSLLYEYFTVYNELTKVKYVTEGMRKPAFLSGEQKKAIVDLLFKTNRKVTVKQLKEDYFKKIECFDSVEISGVEDRFNASLGTYHDLLKIIKDKDFLDNEENEDILEDIVLTLTLFEDREMIEERLKTYAHLFDDKVMKQLKRRRYTGWGRLSRKLINGIRDKQSGKTILDFLKSDGFANRNFMQLIHDDSLTFKEDIQKAQVSGQGDSLHEHIANLAGSPAIKKGILQTVKVVDELVKVMGRHKPENIVIEMARENQTTQKGQKNSRERMKRIEEGIKELGSQILKEHPVENTQLQNEKLYLYYLQNGRDMYVDQELDINRLSDYDVDHIVPQSFLKDDSIDNKVLTRSDKNRGKSDNVPSEEVVKKMKNYWRQLLNAKLITQRKFDNLTKAERGGLSELDKAGFIKRQLVETRQITKHVAQILDSRMNTKYDENDKLIREVKVITLKSKLVSDFRKDFQFYKVREINNYHHAHDAYLNAVVGTALIKKYPKLESEFVYGDYKVYDVRKMIAKSEQEIGKATAKYFFYSNIMNFFKTEITLANGEIRKRPLIETNGETGEIVWDKGRDFATVRKVLSMPQVNIVKKTEVQTGGFSKESILPKRNSDKLIARKKDWDPKKYGGFVSPTVAYSVLVVAKVEKGKSKKLKSVKELLGITIMERSSFEKNPIDFLEAKGYKEVKKDLIIKLPKYSLFELENGRKRMLASARELQKGNELALPSKYVNFLYLASHYEKLKGSPEDNEQKQLFVEQHKHYLDEIIEQISEFSKRVILADANLDKVLSAYNKHRDKPIREQAENIIHLFTLTNLGAPAAFKYFDTTIDRKQYRSTKEVLDATLIHQSITGLYETRIDLSQLGGDEGADKRTADGSEFESPKKKRKV

SEQ ID NO: 354 - protein, 1588 aa, synthetic construct
  REGION 1..1588: note = Description of artificial sequence: 10. monoABE8.1_bpNLS + Y147R_Q154R_T166R polypeptide sequence
MSEVEFSHEYWMRHALTLAKRARDEREVPVGAVLVLNNRVIGEGWNRAIGLHDPTAHAEIMALRQGGLVMQNYRLIDATLYVTFEPCVMCAGAMIHSRIGRVVFGVRNAKTGAAGSLMDVLHYPGMNHRVEITEGILADECAALLCRFFRMPRRVFNAQKKAQSSRDSGGSSGGSSGSETPGTSESATPESSGGSSGGSDKKYSIGLAIGTNSVGWAVITDEYKVPSKKFKVLGNTDRHSIKKNLIGALLFDSGETAEATRLKRTARRRYTRRKNRICYLQEIFSNEMAKVDDSFFHRLEESFLVEEDKKHERHPIFGNIVDEVAYHEKYPTIYHLRKKLVDSTDKADLRLIYLALAHMIKFRGHFLIEGDLNPDNSDVDKLFIQLVQTYNQLFEENPINASGVDAKAILSARLSKSRRLENLIAQLPGEKKNGLFGNLIALSLGLTPNFKSNFDLAEDAKLQLSKDTYDDDLDNLLAQIGDQYADLFLAAKNLSDAILLSDILRVNTEITKAPLSASMIKRYDEHHQDLTLLKALVRQQLPEKYKEIFFDQSKNGYAGYIDGGASQEEFYKFIKPILEKMDGTEELLVKLNREDLLRKQRTFDNGSIPHQIHLGELHAILRRQEDFYPFLKDNREKIEKILTFRIPYYVGPLARGNSRFAWMTRKSEETITPWNFEEVVDKGASAQSFIERMTNFDKNLPNEKVLPKHSLLYEYFTVYNELTKVKYVTEGMRKPAFLSGEQKKAIVDLLFKTNRKVTVKQLKEDYFKKIECFDSVEISGVEDRFNASLGTYHDLLKIIKDKDFLDNEENEDILEDIVLTLTLFEDREMIEERLKTYAHLFDDKVMKQLKRRRYTGWGRLSRKLINGIRDKQSGKTILDFLKSDGFANRNFMQLIHDDSLTFKEDIQKAQVSGQGDSLHEHIANLAGSPAIKKGILQTVKVVDELVKVMGRHKPENIVIEMARENQTTQKGQKNSRERMKRIEEGIKELGSQILKEHPVENTQLQNEKLYLYYLQNGRDMYVDQELDINRLSDYDVDHIVPQSFLKDDSIDNKVLTRSDKNRGKSDNVPSEEVVKKMKNYWRQLLNAKLITQRKFDNLTKAERGGLSELDKAGFIKRQLVETRQITKHVAQILDSRMNTKYDENDKLIREVKVITLKSKLVSDFRKDFQFYKVREINNYHHAHDAYLNAVVGTALIKKYPKLESEFVYGDYKVYDVRKMIAKSEQEIGKATAKYFFYSNIMNFFKTEITLANGEIRKRPLIETNGETGEIVWDKGRDFATVRKVLSMPQVNIVKKTEVQTGGFSKESILPKRNSDKLIARKKDWDPKKYGGFVSPTVAYSVLVVAKVEKGKSKKLKSVKELLGITIMERSSFEKNPIDFLEAKGYKEVKKDLIIKLPKYSLFELENGRKRMLASARELQKGNELALPSKYVNFLYLASHYEKLKGSPEDNEQKQLFVEQHKHYLDEIIEQISEFSKRVILADANLDKVLSAYNKHRDKPIREQAENIIHLFTLTNLGAPAAFKYFDTTIDRKQYRSTKEVLDATLIHQSITGLYETRIDLSQLGGDEGADKRTADGSEFESPKKKRKV

SEQ ID NO: 355 - protein, 1588 aa, synthetic construct
  REGION 1..1588: note = Description of artificial sequence: 11. monoABE8.1_bpNLS + Y147T_Q154R polypeptide sequence
MSEVEFSHEYWMRHALTLAKRARDEREVPVGAVLVLNNRVIGEGWNRAIGLHDPTAHAEIMALRQGGLVMQNYRLIDATLYVTFEPCVMCAGAMIHSRIGRVVFGVRNAKTGAAGSLMDVLHYPGMNHRVEITEGILADECAALLCTFFRMPRRVFNAQKKAQSSTDSGGSSGGSSGSETPGTSESATPESSGGSSGGSDKKYSIGLAIGTNSVGWAVITDEYKVPSKKFKVLGNTDRHSIKKNLIGALLFDSGETAEATRLKRTARRRYTRRKNRICYLQEIFSNEMAKVDDSFFHRLEESFLVEEDKKHERHPIFGNIVDEVAYHEKYPTIYHLRKKLVDSTDKADLRLIYLALAHMIKFRGHFLIEGDLNPDNSDVDKLFIQLVQTYNQLFEENPINASGVDAKAILSARLSKSRRLENLIAQLPGEKKNGLFGNLIALSLGLTPNFKSNFDLAEDAKLQLSKDTYDDDLDNLLAQIGDQYADLFLAAKNLSDAILLSDILRVNTEITKAPLSASMIKRYDEHHQDLTLLKALVRQQLPEKYKEIFFDQSKNGYAGYIDGGASQEEFYKFIKPILEKMDGTEELLVKLNREDLLRKQRTFDNGSIPHQIHLGELHAILRRQEDFYPFLKDNREKIEKILTFRIPYYVGPLARGNSRFAWMTRKSEETITPWNFEEVVDKGASAQSFIERMTNFDKNLPNEKVLPKHSLLYEYFTVYNELTKVKYVTEGMRKPAFLSGEQKKAIVDLLFKTNRKVTVKQLKEDYFKKIECFDSVEISGVEDRFNASLGTYHDLLKIIKDKDFLDNEENEDILEDIVLTLTLFEDREMIEERLKTYAHLFDDKVMKQLKRRRYTGWGRLSRKLINGIRDKQSGKTILDFLKSDGFANRNFMQLIHDDSLTFKEDIQKAQVSGQGDSLHEHIANLAGSPAIKKGILQTVKVVDELVKVMGRHKPENIVIEMARENQTTQKGQKNSRERMKRIEEGIKELGSQILKEHPVENTQLQNEKLYLYYLQNGRDMYVDQELDINRLSDYDVDHIVPQSFLKDDSIDNKVLTRSDKNRGKSDNVPSEEVVKKMKNYWRQLLNAKLITQRKFDNLTKAERGGLSELDKAGFIKRQLVETRQITKHVAQILDSRMNTKYDENDKLIREVKVITLKSKLVSDFRKDFQFYKVREINNYHHAHDAYLNAVVGTALIKKYPKLESEFVYGDYKVYDVRKMIAKSEQEIGKATAKYFFYSNIMNFFKTEITLANGEIRKRPLIETNGETGEIVWDKGRDFATVRKVLSMPQVNIVKKTEVQTGGFSKESILPKRNSDKLIARKKDWDPKKYGGFVSPTVAYSVLVVAKVEKGKSKKLKSVKELLGITIMERSSFEKNPIDFLEAKGYKEVKKDLIIKLPKYSLFELENGRKRMLASARELQKGNELALPSKYVNFLYLASHYEKLKGSPEDNEQKQLFVEQHKHYLDEIIEQISEFSKRVILADANLDKVLSAYNKHRDKPIREQAENIIHLFTLTNLGAPAAFKYFDTTIDRKQYRSTKEVLDATLIHQSITGLYETRIDLSQLGGDEGADKRTADGSEFESPKKKRKV

SEQ ID NO: 356 - protein, 1588 aa, synthetic construct
  REGION 1..1588: note = Description of artificial sequence: 12. monoABE8.1_bpNLS + Y147T_Q154S polypeptide sequence
MSEVEFSHEYWMRHALTLAKRARDEREVPVGAVLVLNNRVIGEGWNRAIGLHDPTAHAEIMALRQGGLVMQNYRLIDATLYVTFEPCVMCAGAMIHSRIGRVVFGVRNAKTGAAGSLMDVLHYPGMNHRVEITEGILADECAALLCTFFRMPRSVFNAQKKAQSSTDSGGSSGGSSGSETPGTSESATPESSGGSSGGSDKKYSIGLAIGTNSVGWAVITDEYKVPSKKFKVLGNTDRHSIKKNLIGALLFDSGETAEATRLKRTARRRYTRRKNRICYLQEIFSNEMAKVDDSFFHRLEESFLVEEDKKHERHPIFGNIVDEVAYHEKYPTIYHLRKKLVDSTDKADLRLIYLALAHMIKFRGHFLIEGDLNPDNSDVDKLFIQLVQTYNQLFEENPINASGVDAKAILSARLSKSRRLENLIAQLPGEKKNGLFGNLIALSLGLTPNFKSNFDLAEDAKLQLSKDTYDDDLDNLLAQIGDQYADLFLAAKNLSDAILLSDILRVNTEITKAPLSASMIKRYDEHHQDLTLLKALVRQQLPEKYKEIFFDQSKNGYAGYIDGGASQEEFYKFIKPILEKMDGTEELLVKLNREDLLRKQRTFDNGSIPHQIHLGELHAILRRQEDFYPFLKDNREKIEKILTFRIPYYVGPLARGNSRFAWMTRKSEETITPWNFEEVVDKGASAQSFIERMTNFDKNLPNEKVLPKHSLLYEYFTVYNELTKVKYVTEGMRKPAFLSGEQKKAIVDLLFKTNRKVTVKQLKEDYFKKIECFDSVEISGVEDRFNASLGTYHDLLKIIKDKDFLDNEENEDILEDIVLTLTLFEDREMIEERLKTYAHLFDDKVMKQLKRRRYTGWGRLSRKLINGIRDKQSGKTILDFLKSDGFANRNFMQLIHDDSLTFKEDIQKAQVSGQGDSLHEHIANLAGSPAIKKGILQTVKVVDELVKVMGRHKPENIVIEMARENQTTQKGQKNSRERMKRIEEGIKELGSQILKEHPVENTQLQNEKLYLYYLQNGRDMYVDQELDINRLSDYDVDHIVPQSFLKDDSIDNKVLTRSDKNRGKSDNVPSEEVVKKMKNYWRQLLNAKLITQRKFDNLTKAERGGLSELDKAGFIKRQLVETRQITKHVAQILDSRMNTKYDENDKLIREVKVITLKSKLVSDFRKDFQFYKVREINNYHHAHDAYLNAVVGTALIKKYPKLESEFVYGDYKVYDVRKMIAKSEQEIGKATAKYFFYSNIMNFFKTEITLANGEIRKRPLIETNGETGEIVWDKGRDFATVRKVLSMPQVNIVKKTEVQTGGFSKESILPKRNSDKLIARKKDWDPKKYGGFVSPTVAYSVLVVAKVEKGKSKKLKSVKELLGITIMERSSFEKNPIDFLEAKGYKEVKKDLIIKLPKYSLFELENGRKRMLASARELQKGNELALPSKYVNFLYLASHYEKLKGSPEDNEQKQLFVEQHKHYLDEIIEQISEFSKRVILADANLDKVLSAYNKHRDKPIREQAENIIHLFTLTNLGAPAAFKYFDTTIDRKQYRSTKEVLDATLIHQSITGLYETRIDLSQLGGDEGADKRTADGSEFESPKKKRKV

SEQ ID NO: 357 - protein, 1588 aa, synthetic construct
  REGION 1..1588: note = Description of artificial sequence: 13. monoABE8.1_bpNLS + H123Y123H_Y147R_Q154R_I76Y polypeptide sequence
MSEVEFSHEYWMRHALTLAKRARDEREVPVGAVLVLNNRVIGEGWNRAIGLHDPTAHAEIMALRQGGLVMQNYRLYDATLYVTFEPCVMCAGAMIHSRIGRVVFGVRNAKTGAAGSLMDVLHHPGMNHRVEITEGILADECAALLCRFFRMPRRVFNAQKKAQSSTDSGGSSGGSSGSETPGTSESATPESSGGSSGGSDKKYSIGLAIGTNSVGWAVITDEYKVPSKKFKVLGNTDRHSIKKNLIGALLFDSGETAEATRLKRTARRRYTRRKNRICYLQEIFSNEMAKVDDSFFHRLEESFLVEEDKKHERHPIFGNIVDEVAYHEKYPTIYHLRKKLVDSTDKADLRLIYLALAHMIKFRGHFLIEGDLNPDNSDVDKLFIQLVQTYNQLFEENPINASGVDAKAILSARLSKSRRLENLIAQLPGEKKNGLFGNLIALSLGLTPNFKSNFDLAEDAKLQLSKDTYDDDLDNLLAQIGDQYADLFLAAKNLSDAILLSDILRVNTEITKAPLSASMIKRYDEHHQDLTLLKALVRQQLPEKYKEIFFDQSKNGYAGYIDGGASQEEFYKFIKPILEKMDGTEELLVKLNREDLLRKQRTFDNGSIPHQIHLGELHAILRRQEDFYPFLKDNREKIEKILTFRIPYYVGPLARGNSRFAWMTRKSEETITPWNFEEVVDKGASAQSFIERMTNFDKNLPNEKVLPKHSLLYEYFTVYNELTKVKYVTEGMRKPAFLSGEQKKAIVDLLFKTNRKVTVKQLKEDYFKKIECFDSVEISGVEDRFNASLGTYHDLLKIIKDKDFLDNEENEDILEDIVLTLTLFEDREMIEERLKTYAHLFDDKVMKQLKRRRYTGWGRLSRKLINGIRDKQSGKTILDFLKSDGFANRNFMQLIHDDSLTFKEDIQKAQVSGQGDSLHEHIANLAGSPAIKKGILQTVKVVDELVKVMGRHKPENIVIEMARENQTTQKGQKNSRERMKRIEEGIKELGSQILKEHPVENTQLQNEKLYLYYLQNGRDMYVDQELDINRLSDYDVDHIVPQSFLKDDSIDNKVLTRSDKNRGKSDNVPSEEVVKKMKNYWRQLLNAKLITQRKFDNLTKAERGGLSELDKAGFIKRQLVETRQITKHVAQILDSRMNTKYDENDKLIREVKVITLKSKLVSDFRKDFQFYKVREINNYHHAHDAYLNAVVGTALIKKYPKLESEFVYGDYKVYDVRKMIAKSEQEIGKATAKYFFYSNIMNFFKTEITLANGEIRKRPLIETNGETGEIVWDKGRDFATVRKVLSMPQVNIVKKTEVQTGGFSKESILPKRNSDKLIARKKDWDPKKYGGFVSPTVAYSVLVVAKVEKGKSKKLKSVKELLGITIMERSSFEKNPIDFLEAKGYKEVKKDLIIKLPKYSLFELENGRKRMLASARELQKGNELALPSKYVNFLYLASHYEKLKGSPEDNEQKQLFVEQHKHYLDEIIEQISEFSKRVILADANLDKVLSAYNKHRDKPIREQAENIIHLFTLTNLGAPAAFKYFDTTIDRKQYRSTKEVLDATLIHQSITGLYETRIDLSQLGGDEGADKRTADGSEFESPKKKRKV

SEQ ID NO: 358 - protein, 1588 aa, synthetic construct
  REGION 1..1588: note = Description of artificial sequence: 14. monoABE8.1_bpNLS + V82S + Q154R polypeptide sequence
MSEVEFSHEYWMRHALTLAKRARDEREVPVGAVLVLNNRVIGEGWNRAIGLHDPTAHAEIMALRQGGLVMQNYRLIDATLYSTFEPCVMCAGAMIHSRIGRVVFGVRNAKTGAAGSLMDVLHYPGMNHRVEITEGILADECAALLCYFFRMPRRVFNAQKKAQSSTDSGGSSGGSSGSETPGTSESATPESSGGSSGGSDKKYSIGLAIGTNSVGWAVITDEYKVPSKKFKVLGNTDRHSIKKNLIGALLFDSGETAEATRLKRTARRRYTRRKNRICYLQEIFSNEMAKVDDSFFHRLEESFLVEEDKKHERHPIFGNIVDEVAYHEKYPTIYHLRKKLVDSTDKADLRLIYLALAHMIKFRGHFLIEGDLNPDNSDVDKLFIQLVQTYNQLFEENPINASGVDAKAILSARLSKSRRLENLIAQLPGEKKNGLFGNLIALSLGLTPNFKSNFDLAEDAKLQLSKDTYDDDLDNLLAQIGDQYADLFLAAKNLSDAILLSDILRVNTEITKAPLSASMIKRYDEHHQDLTLLKALVRQQLPEKYKEIFFDQSKNGYAGYIDGGASQEEFYKFIKPILEKMDGTEELLVKLNREDLLRKQRTFDNGSIPHQIHLGELHAILRRQEDFYPFLKDNREKIEKILTFRIPYYVGPLARGNSRFAWMTRKSEETITPWNFEEVVDKGASAQSFIERMTNFDKNLPNEKVLPKHSLLYEYFTVYNELTKVKYVTEGMRKPAFLSGEQKKAIVDLLFKTNRKVTVKQLKEDYFKKIECFDSVEISGVEDRFNASLGTYHDLLKIIKDKDFLDNEENEDILEDIVLTLTLFEDREMIEERLKTYAHLFDDKVMKQLKRRRYTGWGRLSRKLINGIRDKQSGKTILDFLKSDGFANRNFMQLIHDDSLTFKEDIQKAQVSGQGDSLHEHIANLAGSPAIKKGILQTVKVVDELVKVMGRHKPENIVIEMARENQTTQKGQKNSRERMKRIEEGIKELGSQILKEHPVENTQLQNEKLYLYYLQNGRDMYVDQELDINRLSDYDVDHIVPQSFLKDDSIDNKVLTRSDKNRGKSDNVPSEEVVKKMKNYWRQLLNAKLITQRKFDNLTKAERGGLSELDKAGFIKRQLVETRQITKHVAQILDSRMNTKYDENDKLIREVKVITLKSKLVSDFRKDFQFYKVREINNYHHAHDAYLNAVVGTALIKKYPKLESEFVYGDYKVYDVRKMIAKSEQEIGKATAKYFFYSNIMNFFKTEITLANGEIRKRPLIETNGETGEIVWDKGRDFATVRKVLSMPQVNIVKKTEVQTGGFSKESILPKRNSDKLIARKKDWDPKKYGGFVSPTVAYSVLVVAKVEKGKSKKLKSVKELLGITIMERSSFEKNPIDFLEAKGYKEVKKDLIIKLPKYSLFELENGRKRMLASARELQKGNELALPSKYVNFLYLASHYEKLKGSPEDNEQKQLFVEQHKHYLDEIIEQISEFSKRVILADANLDKVLSAYNKHRDKPIREQAENIIHLFTLTNLGAPAAFKYFDTTIDRKQYRSTKEVLDATLIHQSITGLYETRIDLSQLGGDEGADKRTADGSEFESPKKKRKV

SEQ ID NO: 359 - protein, 4 aa, synthetic construct
  REGION 1..4: note = Description of artificial sequence: synthetic peptide sequence
SGGS

SEQ ID NO: 360 - protein, 24 aa, synthetic construct
  REGION 1..24: note = Description of artificial sequence: synthetic peptide sequence
SGGSSGSETPGTSESATPESSGGS

SEQ ID NO: 361 - protein, 32 aa, synthetic construct
  REGION 1..32: note = Description of artificial sequence: synthetic polypeptide sequence
SGGSSGGSSGSETPGTSESATPESSGGSSGGS

SEQ ID NO: 362 - protein, 104 aa, synthetic construct
  REGION 1..104: note = Description of artificial sequence: synthetic polypeptide sequence
GGSGGSPGSPAGSPTSTEEGTSESATPESGPGTSTEPSEGSAPGSPAGSPTSTEEGTSTEPSEGSAPGTSTEPSEGSAPGTSESATPESGPGSEPATSGGSGGS

SEQ ID NO: 363 - protein, 24 aa, synthetic construct
  REGION 1..24: note = Description of artificial sequence: synthetic peptide sequence
SGGSSGGSSGSETPGTSESATPES

SEQ ID NO: 364 - protein, 40 aa, synthetic construct
  REGION 1..40: note = Description of artificial sequence: synthetic polypeptide sequence
SGGSSGGSSGSETPGTSESATPESSGGSSGGSSGGSSGGS

SEQ ID NO: 365 - protein, 64 aa, synthetic construct
  REGION 1..64: note = Description of artificial sequence: synthetic polypeptide sequence
SGGSSGGSSGSETPGTSESATPESSGGSSGGSSGGSSGGSSGSETPGTSESATPESSGGSSGGS

SEQ ID NO: 366 - protein, 92 aa, synthetic construct
  REGION 1..92: note = Description of artificial sequence: synthetic polypeptide sequence
PGSPAGSPTSTEEGTSESATPESGPGTSTEPSEGSAPGSPAGSPTSTEEGTSTEPSEGSAPGTSTEPSEGSAPGTSESATPESGPGSEPATS

SEQ ID NO: 367 - protein, 5 aa, synthetic construct
  REGION 1..5: note = Description of artificial sequence: synthetic peptide sequence
PAPAP

SEQ ID NO: 368 - protein, 6 aa, synthetic construct
  REGION 1..6: note = Description of artificial sequence: synthetic peptide sequence
PAPAPA

SEQ ID NO: 369 - protein, 7 aa, synthetic construct
  REGION 1..7: note = Description of artificial sequence: synthetic peptide sequence
PAPAPAP

SEQ ID NO: 370 - protein, 8 aa, synthetic construct
  REGION 1..8: note = Description of artificial sequence: synthetic peptide sequence
PAPAPAPA

SEQ ID NO: 371 - protein, 9 aa, synthetic construct
  REGION 1..9: note = Description of artificial sequence: synthetic peptide sequence
PAPAPAPAP

SEQ ID NO: 372 - protein, 15 aa, synthetic construct
  REGION 1..15: note = Description of artificial sequence: synthetic peptide sequence
PAPAPAPAPAPAPAP

SEQ ID NO: 373 - protein, 21 aa, synthetic construct
  REGION 1..21: note = Description of artificial sequence: synthetic peptide sequence
PAPAPAPAPAPAPAPAPAPAP

SEQ ID NO: 374 - skipped

SEQ ID NO: 375 - DNA, 306 bp, synthetic construct
  misc_feature 1..306: note = Description of Artificial Sequence: DnaE Intein-N polynucleotide sequence
  source 1..306: mol_type = other DNA
tgcctgtcatacgaaaccgagatactgacagtagaatatggccttctgccaatcgggaagattgtggagaaacggatagaatgcacagtttactctgtcgataacaatggtaacatttatactcagccagttgcccagtggcacgaccggggagagcaggaagtattcgaatactgtctggaggatggaagtctcattagggccactaaggaccacaaatttatgacagtcgatggccagatgctgcctatagacgaaatctttgagcgagagttggacctcatgcgagttgacaaccttcctaat

SEQ ID NO: 376 - protein, 102 aa, synthetic construct
  REGION 1..102: note = Description of Artificial Sequence: DNAE Intein-N polypeptide sequence
CLSYETEILTVEYGLLPIGKIVEKRIECTVYSVDNNGNIYTQPVAQWHDRGEQEVFEYCLEDGSLIRATKDHKFMTVDGQMLPIDEIFERELDLMRVDNLPN

SEQ ID NO: 377 - DNA, 108 bp, synthetic construct
  misc_feature 1..108: note = Description of Artificial Sequence: DnaE Intein-C polynucleotide sequence
  source 1..108: mol_type = other DNA
atgatcaagatagctacaaggaagtatcttggcaaacaaaacgtttatgatattggagtcgaaagagatcacaactttgctctgaagaacggattcatagcttctaat

SEQ ID NO: 378 - protein, 36 aa, synthetic construct
  REGION 1..36: note = Description of Artificial Sequence: Intein-C polypeptide sequence
MIKIATRKYLGKQNVYDIGVERDHNFALKNGFIASN

SEQ ID NO: 379 - DNA, 303 bp, synthetic construct
  misc_feature 1..303: note = Description of Artificial Sequence: Cfa-N polynucleotide sequence
  source 1..303: mol_type = other DNA
tgcctgtcttatgataccgagatacttaccgttgaatatggcttcttgcctattggaaagattgtcgaagagagaattgaatgcacagtatatactgtagacaagaatggtttcgtttacacacagcccattgctcaatggcacaatcgcggcgaacaagaagtatttgagtactgtctcgaggatggaagcatcatacgagcaactaaagatcataaattcatgaccactgacgggcagatgttgccaatagatgagatattcgagcggggcttggatctcaaacaagtggatggattgcca

SEQ ID NO: 380 - protein, 101 aa, synthetic construct
  REGION 1..101: note = Description of Artificial Sequence: Cfa-N polypeptide sequence
CLSYDTEILTVEYGFLPIGKIVEERIECTVYTVDKNGFVYTQPIAQWHNRGEQEVFEYCLEDGSIIRATKDHKFMTTDGQMLPIDEIFERGLDLKQVDGLP

SEQ ID NO: 381 - DNA, 159 bp, synthetic construct
  misc_feature 1..159: note = Description of Artificial Sequence: Cfa-C polynucleotide sequence
  source 1..159: mol_type = other DNA
atgaagaggactgccgatggatcagagtttgaatctcccaagaagaagaggaaagtaaagataatatctcgaaaaagtcttggtacccaaaatgtctatgatattggagtggagaaagatcacaacttccttctcaagaacggtctcgtagccagcaac

SEQ ID NO: 382 - protein, 53 aa, synthetic construct
  REGION 1..53: note = Description of Artificial Sequence: Cfa-C polypeptide sequence
MKRTADGSEFESPKKKRKVKIISRKSLGTQNVYDIGVEKDHNFLLKNGLVASN

SEQ ID NO: 383 - protein, 1081 aa, Neisseria meningitidis
MAAFKPNPINYILGLDIGIASVGWAMVEIDEEENPIRLIDLGVRVFERAEVPKTGDSLAMARRLARSVRRLTRRRAHRLLRARRLLKREGVLQAADFDENGLIKSLPNTPWQLRAAALDRKLTPLEWSAVLLHLIKHRGYLSQRKNEGETADKELGALLKGVADNAHALQTGDFRTPAELALNKFEKECGHIRNQRGDYSHTFSRKDLQAELNLLFEKQKEFGNPHVSGGLKEGIETLLMTQRPALSGDAVQKMLGHCTFEPAEPKAAKNTYTAERFIWLTKLNNLRILEQGSERPLTDTERATLMDEPYRKSKLTYAQARKLLSLEDTAFFKGLRYGKDNAEASTLMEMKAYHTISRALEKEGLKDKKSPLNLSPELQDEIGTAFSLFKTDEDITGRLKDRIQPEILEALLKHISFDKFVQISLKALRRIVPLMEQGKRYDEACAEIYGDHYGKKNTEEKIYLPPIPADEIRNPVVLRALSQARKVINGVVRRYGSPARIHIETAREVGKSFKDRKEIEKRQEENRKDREKAAAKFREYFPNFVGEPKSKDILKLRLYEQQHGKCLYSGKEINLGRLNEKGYVEIDHALPFSRTWDDSFNNKVLVLGSENQNKGNQTPYEYFNGKDNSREWQEFKARVETSRFPRSKKQRILLQKFDEDGFKERNLNDTRYVNRFLCQFVADRMRLTGKGKKRVFASNGQITNLLRGFWGLRKVRAENDRHHALDAVVVACSTVAMQQKITRFVRYKEMNAFDGKTIDKETGEVLHQKTHFPQPWEFFAQEVMIRVFGKPDGKPEFEEADTPEKLRTLLAEKLSSRPEAVHEYVTPLFVSRAPNRKMSGQGHMETVKSAKRLDEGVSVLRVPLTQLKLKDLEKMVNREREPKLYEALKARLEAHKDDPAKAFAEPFYKYDKAGNRTQQVKAVRVEQVQKTGVWVRNHNGIADNATMVRVDVFEKGDKYYLVPIYSWQVAKGILPDRAVVAYADEEDWTVIDESFRFKFVLYSNDLIKVQLKKDSFLGYFSGLDRATGAISLREHDLEKSKGKDGMHRIGVKTALSFQKYQIDEMGKEIRPCRLKKRPPVR

SEQ ID NO: 384 - RNA, 66 nt, synthetic construct
  misc_feature 1..66: note = Description of Artificial Sequence: Telomerase Ku Binding Motif oligonucleotide sequence
  source 1..66: mol_type = other RNA
ttcttgtcgtacttatagatcgctacgttatttcaattttgaaaatctgagtcctgggagtgcgga

SEQ ID NO: 385 - protein, 1094 aa, synthetic construct
  REGION 1..1094: note = Description of Artificial Sequence: Telomerase Ku Heterodimer polypeptide sequence
MSGWESYYKTEGDEEAEEEQEENLEASGDYKYSGRDSLIFLVDASKAMFESQSEDELTPFDMSIQCIQSVYISKIISSDRDLLAVVFYGTEKDKNSVNFKNIYVLQELDNPGAKRILELDQFKGQQGQKRFQDMMGHGSDYSLSEVLWVCANLFSDVQFKMSHKRIMLFTNEDNPHGNDSAKASRARTKAGDLRDTGIFLDLMHLKKPGGFDISLFYRDIISIAEDEDLRVHFEESSKLEDLLRKVRAKETRKRALSRLKLKLNKDIVISVGIYNLVQKALKPPPIKLYRETNEPVKTKTRTFNTSTGGLLLPSDTKRSQIYGSRQIILEKEETEELKRFDDPGLMLMGFKPLVLLKKHHYLRPSLFVYPEESLVIGSSTLFSALLIKCLEKEVAALCRYTPRRNIPPYFVALVPQEEELDDQKIQVTPPGFQLVFLPFADDKRKMPFTEKIMATPEQVGKMKAIVEKLRFTYRSDSFENPVLQQHFRNLEALALDLMEPEQAVDLTLPKVEAMNKRLGSLVDEFKELVYPPDYNPEGKVTKRKHDNEGSGSKRPKVEYSEEELKTHISKGTLGKFTVPMLKEACRAYGLKSGLKKQELLEALTKHFQDMVRSGNKAAVVLCMDVGFTMSNSIPGIESPFEQAKKVITMFVQRQVFAENKDEIALVLFGTDGTDNPLSGGDQYQNITVHRHLMLPDFDLLEDIESKIQPGSQQADFLDALIVSMDVIQHETIGKKFEKRHIEIFTDLSSRFSKSQLDIIIHSLKKCDISERHSIHWPCRLTIGSNLSIRIAAYKSILQERVKKTWTVVDAKTLKKEDIQKETVYCLNDDDETEVLKEDIIQGFRYGSDIVPFSKVDEEQMKYKSEGKCFSVLGFCKSSQVQRRFFMGNQVLKVFAARDDEAAAVALSSLIHALDDLDMVAIVRYAYDKRANPQVGVAFPHIKHNYECLVYVQLPFMEDLRQYMFSSLKNSKKYAPTEAQLNAVDALIDSMSLAKKDEKTDTLEDLFPTTKIPNPRFQRLFQCLLHRALHPREPLPPIQQHIWNMLNPPAEVTTKSQIPLSKIKTLFPLIEAKKKDQVTAQEIFQDNHEDGPTAK

SEQ ID NO: 386 - RNA, 10 nt, synthetic construct
  misc_feature 1..10: note = Description of Artificial Sequence: Telomerase Sm7 consensus site (single stranded) oligonucleotide sequence
  source 1..10: mol_type = other RNA
aatttttgga

SEQ ID NO: 387 - protein, 83 aa, synthetic construct
  REGION 1..83: note = Description of Artificial Sequence: MS2 coat protein polypeptide sequence
GSVIDVSSQRVNVQRPLDALGNSLNSPVIIKLKGDREFRGVLKSFDLHMNLVLNDAEELEDGEVTRRLGTVLIRGDNIVYISP

SEQ ID NO: 388 - RNA, 26 nt, synthetic construct
  misc_feature 1..26: note = Description of Artificial Sequence: PP7 phage operator stem loop oligonucleotide sequence
  source 1..26: mol_type = other RNA
ataaggagtttatatggaaaccctta

SEQ ID NO: 389 - protein, 128 aa, synthetic construct
  REGION 1..128: note = Description of Artificial Sequence: PP7 coat protein (PCP) polypeptide sequence
MSKTIVLSVGEATRTLTEIQSTADRQIFEEKVGPLVGRLRLTASLRQNGAKTAYRVNLKLDQADVVDCSTSVCGELPKVRYTQVWSHDVTIVANSTEASRKSLYDLTKSLVATSQVEDLVVNLVPLGR

SEQ ID NO: 390 - RNA, 19 nt, synthetic construct
  misc_feature 1..19: note = Description of Artificial Sequence: SfMu Com stem loop oligonucleotide sequence
  source 1..19: mol_type = other RNA
ctgaatgcctgcgagcatc

SEQ ID NO: 391 - protein, 62 aa, synthetic construct
  REGION 1..62: note = Description of Artificial Sequence: SfMu Com binding protein polypeptide sequence
MKSIRCKNCNKLLFKADSFDHIEIRCPRCKRHIIMLNACEHPTEKHCGKREKITHSDETVRY

SEQ ID NO: 392 - protein, 47 aa, synthetic construct
  REGION 1..47: note = Description of Artificial Sequence: leucine zipper polypeptide sequence
LEIRAAFLRQRNTALRTEVAELEQEVQRLENEVSQYETRYGPLGGGK

SEQ ID NO: 393 - protein, 47 aa, synthetic construct
  REGION 1..47: note = Description of Artificial Sequence: leucine zipper polypeptide sequence
LEIEAAFLERENTALETRVAELRQRVQRLRNRVSQYRTRYGPLGGGK

SEQ ID NO: 394 - RNA, 100 nt, synthetic construct
  misc_feature 1..100: note = Description of Artificial Sequence: synthetic polynucleotide sequence
  source 1..100: mol_type = other RNA
tataggaaaaccagtgagtcgttttagagctagaaatagcaagttaaaataaggctagtccgttatcaacttgaaaaagtggcaccgagtcggtgctttt

SEQ ID NO: 395 - RNA, 100 nt, synthetic construct
  misc_feature 1..100: note = Description of Artificial Sequence: synthetic polynucleotide sequence
  source 1..100: mol_type = other RNA
tactcacctctgcatgctcagttttagagctagaaatagcaagttaaaataaggctagtccgttatcaacttgaaaaagtggcaccgagtcggtgctttt

SEQ ID NO: 396 - RNA, 100 nt, synthetic construct
  misc_feature 1..100: note = Description of Artificial Sequence: synthetic polynucleotide sequence
  source 1..100: mol_type = other RNA
actcacctctgcatgctcatgttttagagctagaaatagcaagttaaaataaggctagtccgttatcaacttgaaaaagtggcaccgagtcggtgctttt

SEQ ID NO: 397 - RNA, 100 nt, synthetic construct
  misc_feature 1..100: note = Description of Artificial Sequence: synthetic polynucleotide sequence
  source 1..100: mol_type = other RNA
taccacctatgagagaagacgttttagagctagaaatagcaagttaaaataaggctagtccgttatcaacttgaaaaagtggcaccgagtcggtgctttt

SEQ ID NO: 398 - RNA, 109 nt, synthetic construct
  misc_feature 1..109: note = Description of Artificial Sequence: synthetic polynucleotide sequence
  source 1..109: mol_type = other RNA
atactcacctctgcatgctcagttttagtactctgtaatgaaaattacagaatctactaaaacaaggcaaaatgccgtgtttatctcgtcaacttgttggcgagatttt

SEQ ID NO: 399 - RNA, 109 nt, synthetic construct
  misc_feature 1..109: note = Description of Artificial Sequence: synthetic polynucleotide sequence
  source 1..109: mol_type = other RNA
actggttttcctataaggtgtgttttagtactctgtaatgaaaattacagaatctactaaaacaaggcaaaatgccgtgtttatctcgtcaacttgttggcgagatttt

SEQ ID NO: 400 - RNA, 119 nt, synthetic construct
  misc_feature 1..119: note = Description of Artificial Sequence: synthetic polynucleotide sequence
  source 1..119: mol_type = other RNA
gttctgtcttttggtcaggacaaccgtctagctataagtgctgcagggtgtgagaaactcctattgctggacgatgtctcttacgaggcattagcacttggcaggatggcttctcatcg

SEQ ID NO: 401 - RNA, 119 nt, synthetic construct
  misc_feature 1..119: note = Description of Artificial Sequence: synthetic polynucleotide sequence
  source 1..119: mol_type = other RNA
gttctgtcttttggtcaggacaaccgtctagctataagtgctgcagggtgtgagaaactcctattgctggacgatgtctcttacgaggcattagcactcctataaggtgtgaaagtctg

SEQ ID NO: 402 - RNA, 119 nt, synthetic construct
  misc_feature 1..119: note = Description of Artificial Sequence: synthetic polynucleotide sequence
  source 1..119: mol_type = other RNA
gttctgtcttttggtcaggacaaccgtctagctataagtgctgcagggtgtgagaaactcctattgctggacgatgtctcttacgaggcattagcactgagcccatgcagctctccaga

SEQ ID NO: 403 - RNA, 119 nt, synthetic construct
  misc_feature 1..119: note = Description of Artificial Sequence: synthetic polynucleotide sequence
  source 1..119: mol_type = other RNA
gttctgtcttttggtcaggacaaccgtctagctataagtgctgcagggtgtgagaaactcctattgctggacgatgtctcttacgaggcattagcacctcctcagttgtgagcccatgc

SEQ ID NO: 404 - RNA, 119 nt, synthetic construct
  misc_feature 1..119: note = Description of Artificial Sequence: synthetic polynucleotide sequence
  source 1..119: mol_type = other RNA
gttctgtcttttggtcaggacaaccgtctagctataagtgctgcagggtgtgagaaactcctattgctggacgatgtctcttacgaggcattagcacgtagaagggatatacaaagtgg

SEQ ID NO: 405 - RNA, 119 nt, synthetic construct
  misc_feature 1..119: note = Description of Artificial Sequence: synthetic polynucleotide sequence
  source 1..119: mol_type = other RNA
gttctgtcttttggtcaggacaaccgtctagctataagtgctgcagggtgtgagaaactcctattgctggacgatgtctcttacgaggcattagcacccactttgtatatcccttctac

SEQ ID NO: 406 - RNA, 119 nt, synthetic construct
  misc_feature 1..119: note = Description of Artificial Sequence: synthetic polynucleotide sequence
  source 1..119: mol_type = other RNA
gttctgtcttttggtcaggacaaccgtctagctataagtgctgcagggtgtgagaaactcctattgctggacgatgtctcttacgaggcattagcacggtgtctatttccactttgtat

SEQ ID NO: 407 - RNA, 119 nt, synthetic construct
  misc_feature 1..119: note = Description of Artificial Sequence: synthetic polynucleotide sequence
  source 1..119: mol_type = other RNA
gttctgtcttttggtcaggacaaccgtctagctataagtgctgcagggtgtgagaaactcctattgctggacgatgtctcttacgaggcattagcaccatgagcatgcagaggtgagta

SEQ ID NO: 408 - RNA, 20 nt, synthetic construct
  misc_feature 1..20: note = Description of Artificial Sequence: synthetic oligonucleotide sequence
  source 1..20: mol_type = other RNA
tataggaaaaccagtgagtc

SEQ ID NO: 409 - RNA, 20 nt, synthetic construct
  misc_feature 1..20: note = Description of Artificial Sequence: synthetic oligonucleotide sequence
  source 1..20: mol_type = other RNA
tactcacctctgcatgctca

SEQ ID NO: 410 - RNA, 20 nt, synthetic construct
  misc_feature 1..20: note = Description of Artificial Sequence: synthetic oligonucleotide sequence
  source 1..20: mol_type = other RNA
actcacctctgcatgctcat

SEQ ID NO: 411 - RNA, 20 nt, synthetic construct
  misc_feature 1..20: note = Description of Artificial Sequence: synthetic oligonucleotide sequence
  source 1..20: mol_type = other RNA
taccacctatgagagaagac

SEQ ID NO: 412 - RNA, 21 nt, synthetic construct
  misc_feature 1..21: note = Description of Artificial Sequence: synthetic oligonucleotide sequence
  source 1..21: mol_type = other RNA
atactcacctctgcatgctca

SEQ ID NO: 413 - RNA, 21 nt, synthetic construct
  misc_feature 1..21: note = Description of Artificial Sequence: synthetic oligonucleotide sequence
  source 1..21: mol_type = other RNA
actggttttcctataaggtgt

SEQ ID NO: 414 - RNA, 22 nt, synthetic construct
  misc_feature 1..22: note = Description of Artificial Sequence: synthetic oligonucleotide sequence
  source 1..22: mol_type = other RNA
ttggcaggatggcttctcatcg

SEQ ID NO: 415 - RNA, 22 nt, synthetic construct
  misc_feature 1..22: note = Description of Artificial Sequence: synthetic oligonucleotide sequence
  source 1..22: mol_type = other RNA
tcctataaggtgtgaaagtctg

SEQ ID NO: 416 - RNA, 22 nt, synthetic construct
  misc_feature 1..22: note = Description of Artificial Sequence: synthetic oligonucleotide sequence
  source 1..22: mol_type = other RNA
tgagcccatgcagctctccaga

SEQ ID NO: 417 - RNA, 22 nt, synthetic construct
  misc_feature 1..22: note = Description of Artificial Sequence: synthetic oligonucleotide sequence
  source 1..22: mol_type = other RNA
ctcctcagttgtgagcccatgc

SEQ ID NO: 418 - RNA, 22 nt, synthetic construct
  misc_feature 1..22: note = Description of Artificial Sequence: synthetic oligonucleotide sequence
  source 1..22: mol_type = other RNA
gtagaagggatatacaaagtgg

SEQ ID NO: 419 - RNA, 22 nt, synthetic construct
  misc_feature 1..22: note = Description of Artificial Sequence: synthetic oligonucleotide sequence
  source 1..22: mol_type = other RNA
ccactttgtatatcccttctac

SEQ ID NO: 420 - RNA, 22 nt, synthetic construct
  misc_feature 1..22: note = Description of Artificial Sequence: synthetic oligonucleotide sequence
  source 1..22: mol_type = other RNA
ggtgtctatttccactttgtat

SEQ ID NO: 421 - RNA, 22 nt, synthetic construct
  misc_feature 1..22: note = Description of Artificial Sequence: synthetic oligonucleotide sequence
  source 1..22: mol_type = other RNA
catgagcatgcagaggtgagta

SEQ ID NO: 422 - RNA, 20 nt, synthetic construct
  misc_feature 1..20: note = Description of Artificial Sequence: synthetic oligonucleotide sequence
  source 1..20: mol_type = other RNA
ggctatcgtcaccaatccca

SEQ ID NO: 423 - RNA, 20 nt, synthetic construct
  misc_feature 1..20: note = Description of Artificial Sequence: synthetic oligonucleotide sequence
  source 1..20: mol_type = other RNA
gctatcgtcaccaatcccaa

SEQ ID NO: 424 - RNA, 20 nt, synthetic construct
  misc_feature 1..20: note = Description of Artificial Sequence: synthetic oligonucleotide sequence
  source 1..20: mol_type = other RNA
ggctatcgtcaccaatccca

SEQ ID NO: 425 - DNA, 20 bp, Homo sapiens
  source 1..20: mol_type = other DNA
tataggaaaaccagtgagtc

SEQ ID NO: 426 - DNA, 20 bp, Homo sapiens
  source 1..20: mol_type = other DNA
tactcacctctgcatgctca

SEQ ID NO: 427 - DNA, 20 bp, Homo sapiens
  source 1..20: mol_type = other DNA
actcacctctgcatgctcat

SEQ ID NO: 428 - DNA, 20 bp, Homo sapiens
  source 1..20: mol_type = other DNA
taccacctatgagagaagac

SEQ ID NO: 429 - DNA, 21 bp, Homo sapiens
  source 1..21: mol_type = other DNA
atactcacctctgcatgctca

SEQ ID NO: 430 - DNA, 21 bp, Homo sapiens
  source 1..21: mol_type = other DNA
actggttttcctataaggtgt

SEQ ID NO: 431 - DNA, 22 bp, Homo sapiens
  source 1..22: mol_type = other DNA
ttggcaggatggcttctcatcg

SEQ ID NO: 432 - DNA, 26 bp, Homo sapiens
  source 1..26: mol_type = other DNA
gttttcctataaggtgtgaaagtctg

SEQ ID NO: 433 - DNA, 26 bp, Homo sapiens
  source 1..26: mol_type = other DNA
gttgtgagcccatgcagctctccaga

SEQ ID NO: 434 - DNA, 26 bp, Homo sapiens
  source 1..26: mol_type = other DNA
attcctcctcagttgtgagcccatgc

SEQ ID NO: 435 - DNA, 26 bp, Homo sapiens
  source 1..26: mol_type = other DNA
atttgtagaagggatatacaaagtgg

SEQ ID NO: 436 - DNA, 26 bp, Homo sapiens
  source 1..26: mol_type = other DNA
atttccactttgtatatcccttctac

SEQ ID NO: 437 - DNA, 26 bp, Homo sapiens
  source 1..26: mol_type = other DNA
atttggtgtctatttccactttgtat

SEQ ID NO: 438 - DNA, 26 bp, Homo sapiens
  source 1..26: mol_type = other DNA
attccatgagcatgcagaggtgagta

SEQ ID NO: 439 - DNA, 20 bp, Homo sapiens
  source 1..20: mol_type = other DNA
ggctatcgtcaccaatccca

SEQ ID NO: 440 - DNA, 20 bp, Homo sapiens
  source 1..20: mol_type = other DNA
gctatcgtcaccaatcccaa

SEQ ID NO: 441 - DNA, 20 bp, Homo sapiens
  source 1..20: mol_type = other DNA
ggctatcgtcaccaatccca

SEQ ID NO: 442 - protein, 1588 aa, synthetic construct; identical to SEQ ID NO: 337
  REGION 1..1588: note = Description of Artificial Sequence: synthetic polypeptide sequence

SEQ ID NO: 443 - protein, 1837 aa, synthetic construct
  REGION 1..1837: note = Description of Artificial Sequence: synthetic polypeptide sequence
MSSETGPVAVDPTLRRRIEPHEFEVFFDPRELRKETCLLYEINWGGRHSIWRHTSQNTNKHVEVNFIEKFTTERYFCPNTRCSITWFLSWSPCGECSRAITEFLSRYPHVTLFIYIARLYHHADPRNRQGLRDLISSGVTIQIMTEQESGYCWRNFVNYSPSNEAHWPRYPHLWVRLYVLELYCIILGLPPCLNILRRKQPQLTFFTIALQSCHYQRLPPHILWATGLKSGGSSGGSSGSETPGTSESATPESSGGSSGGSDKKYSIGLAIGTNSVGWAVITDEYKVPSKKFKVLGNTDRHSIKKNLIGALLFDSGETAEATRLKRTARRRYTRRKNRICYLQEIFSNEMAKVDDSFFHRLEESFLVEEDKKHERHPIFGNIVDEVAYHEKYPTIYHLRKKLVDSTDKADLRLIYLALAHMIKFRGHFLIEGDLNPDNSDVDKLFIQLVQTYNQLFEENPINASGVDAKAILSARLSKSRRLENLIAQLPGEKKNGLFGNLIALSLGLTPNFKSNFDLAEDAKLQLSKDTYDDDLDNLLAQIGDQYADLFLAAKNLSDAILLSDILRVNTEITKAPLSASMIKRYDEHHQDLTLLKALVRQQLPEKYKEIFFDQSKNGYAGYIDGGASQEEFYKFIKPILEKMDGTEELLVKLNREDLLRKQRTFDNGSIPHQIHLGELHAILRRQEDFYPFLKDNREKIEKILTFRIPYYVGPLARGNSRFAWMTRKSEETITPWNFEEVVDKGASAQSFIERMTNFDKNLPNEKVLPKHSLLYEYFTVYNELTKVKYVTEGMRKPAFLSGEQKKAIVDLLFKTNRKVTVKQLKEDYFKKIECFDSVEISGVEDRFNASLGTYHDLLKIIKDKDFLDNEENEDILEDIVLTLTLFEDREMIEERLKTYAHLFDDKVMKQLKRRRYTGWGRLSRKLINGIRDKQSGKTILDFLKSDGFANRNFMQLIHDDSLTFKEDIQKAQVSGQGDSLHEHIANLAGSPAIKKGILQTVKVVDELVKVMGRHKPENIVIEMARENQTTQKGQKNSRERMKRIEEGIKELGSQILKEHPVENTQLQNEKLYLYYLQNGRDMYVDQELDINRLSDYDVDHIVPQSFLKDDSIDNKVLTRSDKNRGKSDNVPSEEVVKKMKNYWRQLLNAKLITQRKFDNLTKAERGGLSELDKAGFIKRQLVETRQITKHVAQILDSRMNTKYDENDKLIREVKVITLKSKLVSDFRKDFQFYKVREINNYHHAHDAYLNAVVGTALIKKYPKLESEFVYGDYKVYDVRKMIAKSEQEIGKATAKYFFYSNIMNFFKTEITLANGEIRKRPLIETNGETGEIVWDKGRDFATVRKVLSMPQVNIVKKTEVQTGGFSKESILPKRNSDKLIARKKDWDPKKYGGFDSPTVAYSVLVVAKVEKGKSKKLKSVKELLGITIMERSSFEKNPIDFLEAKGYKEVKKDLIIKLPKYSLFELENGRKRMLASAGELQKGNELALPSKYVNFLYLASHYEKLKGSPEDNEQKQLFVEQHKHYLDEIIEQISEFSKRVILADANLDKVLSAYNKHRDKPIREQAENIIHLFTLTNLGAPAAFKYFDTTIDRKRYTSTKEVLDATLIHQSITGLYETRIDLSQLGGDSGGSGGSGGSTNLSDIIEKETGKQLVIQESILMLPEEVEEVIGNKPESDILVHTAYDESTDENVMLLTSDAPEYKPWALVIQDSNGENKIKMLSGGSGGSGGSTNLSDIIEKETGKQLVIQESILMLPEEVEEVIGNKPESDILVHTAYDESTDENVMLLTSDAPEYKPWALVIQDSNGENKIKMLSGGSKRTADGSEFESPKKKRKVE

SEQ ID NO: 444 - protein, 1588 aa, synthetic construct; identical to SEQ ID NO: 352
  REGION 1..1588: note = Description of Artificial Sequence: synthetic polypeptide sequence

SEQ ID NO: 445 - protein, 1837 aa, synthetic construct
  REGION 1..1837: note = Description of Artificial Sequence: synthetic polypeptide sequence
MSSETGPVAVDPTLRRRIEPHEFEVFFDPRELRKETCLLYEINWGGRHSIWRHTSQNTNKHVEVNFIEKFTTERYFCPNTRCSITWFLSWSPCGECSRAITEFLSRYPHVTLFIYIARLYHHADPRNRQGLRDLISSGVTIQIMTEQESGYCWRNFVNYSPSNEAHWPRYPHLWVRLYVLELYCIILGLPPCLNILRRKQPQLTFFTIALQSCHYQRLPPHILWATGLKSGGSSGGSSGSETPGTSESATPESSGGSSGGSDKKYSIGLAIGTNSVGWAVITDEYKVPSKKFKVLGNTDRHSIKKNLIGALLFDSGETAEATRLKRTARRRYTRRKNRICYLQEIFSNEMAKVDDSFFHRLEESFLVEEDKKHERHPIFGNIVDEVAYHEKYPTIYHLRKKLVDSTDKADLRLIYLALAHMIKFRGHFLIEGDLNPDNSDVDKLFIQLVQTYNQLFEENPINASGVDAKAILSARLSKSRRLENLIAQLPGEKKNGLFGNLIALSLGLTPNFKSNFDLAEDAKLQLSKDTYDDDLDNLLAQIGDQYADLFLAAKNLSDAILLSDILRVNTEITKAPLSASMIKRYDEHHQDLTLLKALVRQQLPEKYKEIFFDQSKNGYAGYIDGGASQEEFYKFIKPILEKMDGTEELLVKLNREDLLRKQRTFDNGSIPHQIHLGELHAILRRQEDFYPFLKDNREKIEKILTFRIPYYVGPLARGNSRFAWMTRKSEETITPWNFEEVVDKGASAQSFIERMTNFDKNLPNEKVLPKHSLLYEYFTVYNELTKVKYVTEGMRKPAFLSGEQKKAIVDLLFKTNRKVTVKQLKEDYFKKIECFDSVEISGVEDRFNASLGTYHDLLKIIKDKDFLDNEENEDILEDIVLTLTLFEDREMIEERLKTYAHLFDDKVMKQLKRRRYTGWGRLSRKLINGIRDKQSGKTILDFLKSDGFANRNFMQLIHDDSLTFKEDIQKAQVSGQGDSLHEHIANLAGSPAIKKGILQTVKVVDELVKVMGRHKPENIVIEMARENQTTQKGQKNSRERMKRIEEGIKELGSQILKEHPVENTQLQNEKLYLYYLQNGRDMYVDQELDINRLSDYDVDHIVPQSFLKDDSIDNKVLTRSDKNRGKSDNVPSEEVVKKMKNYWRQLLNAKLITQRKFDNLTKAERGGLSELDKAGFIKRQLVETRQITKHVAQILDSRMNTKYDENDKLIREVKVITLKSKLVSDFRKDFQFYKVREINNYHHAHDAYLNAVVGTALIKKYPKLESEFVYGDYKVYDVRKMIAKSEQEIGKATAKYFFYSNIMNFFKTEITLANGEIRKRPLIETNGETGEIVWDKGRDFATVRKVLSMPQVNIVKKTEVQTGGFSKESILPKRNSDKLIARKKDWDPKKYGGFVSPTVAYSVLVVAKVEKGKSKKLKSVKELLGITIMERSSFEKNPIDFLEAKGYKEVKKDLIIKLPKYSLFELENGRKRMLASARELQKGNELALPSKYVNFLYLASHYEKLKGSPEDNEQKQLFVEQHKHYLDEIIEQISEFSKRVILADANLDKVLSAYNKHRDKPIREQAENIIHLFTLTNLGAPAAFKYFDTTIDRKQYRSTKEVLDATLIHQSITGLYETRIDLSQLGGDSGGSGGSGGSTNLSDIIEKETGKQLVIQESILMLPEEVEEVIGNKPESDILVHTAYDESTDENVMLLTSDAPEYKPWALVIQDSNGENKIKMLSGGSGGSGGSTNLSDIIEKETGKQLVIQESILMLPEEVEEVIGNKPESDILVHTAYDESTDENVMLLTSDAPEYKPWALVIQDSNGENKIKMLSGGSKRTADGSEFESPKKKRKVE

SEQ ID NO: 446 - protein, 1273 aa, synthetic construct
  REGION 1..1273: note = Description of Artificial Sequence: synthetic polypeptide sequence
MSEVEFSHEYWMRHALTLAKRARDEREVPVGAVLVLNNRVIGEGWNRAIGLHDPTAHAEIMALRQGGLVMQNYRLIDATLYVTFEPCVMCAGAMIHSRIGRVVFGVRNAKTGAAGSLMDVLHHPGMNHRVEITEGILADECAALLCRFFRMPRRVFNAQKKAQSSTDSGGSSGGSSGSETPGTSESATPESSGGSSGGSKRNYILGLAIGITSVGYGIIDYETRDVIDAGVRLFKEANVENNEGRRSKRGARRLKRRRRHRIQRVKKLLFDYNLLTDHSELSGINPYEARVKGLSQKLSEEEFSAALLHLAKRRGVHNVNEVEEDTGNELSTKEQISRNSKALEEKYVAELQLERLKKDGEVRGSINRFKTSDYVKEAKQLLKVQKAYHQLDQSFIDTYIDLLETRRTYYEGPGEGSPFGWKDIKEWYEMLMGHCTYFPEELRSVKYAYNADLYNALNDLNNLVITRDENEKLEYYEKFQIIENVFKQKKKPTLKQIAKEILVNEEDIKGYRVTSTGKPEFTNLKVYHDIKDITARKEIIENAELLDQIAKILTIYQSSEDIQEELTNLNSELTQEEIEQISNLKGYTGTHNLSLKAINLILDELWHTNDNQIAIFNRLKLVPKKVDLSQQKEIPTTLVDDFILSPVVKRSFIQSIKVINAIIKKYGLPNDIIIELAREKNSKDAQKMINEMQKRNRQTNERIEEIIRTTGKENAKYLIEKIKLHDMQEGKCLYSLEAIPLEDLLNNPFNYEVDHIIPRSVSFDNSFNNKVLVKQEENSKKGNRTPFQYLSSSDSKISYETFKKHILNLAKGKGRISKTKKEYLLEERDINRFSVQKDFINRNLVDTRYATRGLMNLLRSYFRVNNLDVKVKSINGGFTSFLRRKWKFKKERNKGYKHHAEDALIIANADFIFKEWKKLDKAKKVMENQMFEEKQAESMPEIETEQEYKEIFITPHQIKHIKDFKDYKYSHRVDKKPNRELINDTLYSTRKDDKGNTLIVNNLNGLYDKDNDKLKKLINKSPEKLLMYHHDPQTYQKLKLIMEQYGDEKNPLYKYYEETGNYLTKYSKKDNGPVIKKIKYYGNKLNAHLDITDDYPNSRNKVVKLSLKPYRFDVYLDNGVYKFVTVKNLDVIKKENYYEVNSKCYEEAKKLKKISNQAEFIASFYNNDLIKINGELYRVIGVNNDLLNRIEVNMIDITYREYLENMNDKRPPRIIKTIASKTQSIKKYSTDILGNLYEVKSKKHPQIIKKGEGADKRTADGSEFESPKKKRKV

SEQ ID NO: 447 - protein, 1556 aa, synthetic construct
  REGION 1..1556: note = Description of Artificial Sequence: synthetic polypeptide sequence
MSSETGPVAVDPTLRRRIEPHEFEVFFDPRELRKETCLLYEINWGGRHSIWRHTSQNTNKHVEVNFIEKFTTERYFCPNTRCSITWFLSWSPCGECSRAITEFLSRYPHVTLFIYIARLYHHADPRNRQGLRDLISSGVTIQIMTEQESGYCWRNFVNYSPSNEAHWPRYPHLWVRLYVLELYCIILGLPPCLNILRRKQPQLTFFTIALQSCHYQRLPPHILWATGLKSGGSSGGSSGSETPGTSESATPESSGGSSGGSGKRNYILGLAIGITSVGYGIIDYETRDVIDAGVRLFKEANVENNEGRRSKRGARRLKRRRRHRIQRVKKLLFDYNLLTDHSELSGINPYEARVKGLSQKLSEEEFSAALLHLAKRRGVHNVNEVEEDTGNELSTKEQISRNSKALEEKYVAELQLERLKKDGEVRGSINRFKTSDYVKEAKQLLKVQKAYHQLDQSFIDTYIDLLETRRTYYEGPGEGSPFGWKDIKEWYEMLMGHCTYFPEELRSVKYAYNADLYNALNDLNNLVITRDENEKLEYYEKFQIIENVFKQKKKPTLKQIAKEILVNEEDIKGYRVTSTGKPEFTNLKVYHDIKDITARKEIIENAELLDQIAKILTIYQSSEDIQEELTNLNSELTQEEIEQISNLKGYTGTHNLSLKAINLILDELWHTNDNQIAIFNRLKLVPKKVDLSQQKEIPTTLVDDFILSPVVKRSFIQSIKVINAIIKKYGLPNDIIIELAREKNSKDAQKMINEMQKRNRQTNERIEEIIRTTGKENAKYLIEKIKLHDMQEGKCLYSLEAIPLEDLLNNPFNYEVDHIIPRSVSFDNSFNNKVLVKQEENSKKGNRTPFQYLSSSDSKISYETFKKHILNLAKGKGRISKTKKEYLLEERDINRFSVQKDFINRNLVDTRYATRGLMNLLRSYFRVNNLDVKVKSINGGFTSFLRRKWKFKKERNKGYKHHAEDALIIANADFIFKEWKKLDKAKKVMENQMFEEKQAESMPEIETEQEYKEIFITPHQIKHIKDFKDYKYSHRVDKKPNRELINDTLYSTRKDDKGNTLIVNNLNGLYDKDNDKLKKLINKSPEKLLMYHHDPQTYQKLKLIMEQYGDEKNPLYKYYEETGNYLTKYSKKDNGPVIKKIKYYGNKLNAHLDITDDYPNSRNKVVKLSLKPYRFDVYLDNGVYKFVTVKNLDVIKKENYYEVNSKCYEEAKKLKKISNQAEFIASFYNNDLIKINGELYRVIGVNNDLLNRIEVNMIDITYREYLENMNDKRPPRIIKTIASKTQSIKKYSTDILGNLYEVKSKKHPQIIKKGGSPKKKRKVSSDYKDHDGDYKDHDIDYKDDDDKSGGSGGSGGSTNLSDIIEKETGKQLVIQESILMLPEEVEEVIGNKPESDILVHTAYDESTDENVMLLTSDAPEYKPWALVIQDSNGENKIKMLSGGSGGSGGSTNLSDIIEKETGKQLVIQESILMLPEEVEEVIGNKPESDILVHTAYDESTDENVMLLTSDAPEYKPWALVIQDSNGENKIKMLSGGSKRTADGSEFESPKKKRKVE

SEQ ID NO: 448 - protein, 1556 aa, synthetic construct
  REGION 1..1556: note = Description of Artificial Sequence: synthetic polypeptide sequence
MSSETGPVAVDPTLRRRIEPHEFEVFFDPRELRKETCLLYEINWGGRHSIWRHTSQNTNKHVEVNFIEKFTTERYFCPNTRCSITWFLSWSPCGECSRAITEFLSRYPHVTLFIYIARLYHHADPRNRQGLRDLISSGVTIQIMTEQESGYCWRNFVNYSPSNEAHWPRYPHLWVRLYVLELYCIILGLPPCLNILRRKQPQLTFFTIALQSCHYQRLPPHILWATGLKSGGSSGGSSGSETPGTSESATPESSGGSSGGSGKRNYILGLAIGITSVGYGIIDYETRDVIDAGVRLFKEANVENNEGRRSKRGARRLKRRRRHRIQRVKKLLFDYNLLTDHSELSGINPYEARVKGLSQKLSEEEFSAALLHLAKRRGVHNVNEVEEDTGNELSTKEQISRNSKALEEKYVAELQLERLKKDGEVRGSINRFKTSDYVKEAKQLLKVQKAYHQLDQSFIDTYIDLLETRRTYYEGPGEGSPFGWKDIKEWYEMLMGHCTYFPEELRSVKYAYNADLYNALNDLNNLVITRDENEKLEYYEKFQIIENVFKQKKKPTLKQIAKEILVNEEDIKGYRVTSTGKPEFTNLKVYHDIKDITARKEIIENAELLDQIAKILTIYQSSEDIQEELTNLNSELTQEEIEQISNLKGYTGTHNLSLKAINLILDELWHTNDNQIAIFNRLKLVPKKVDLSQQKEIPTTLVDDFILSPVVKRSFIQSIKVINAIIKKYGLPNDIIIELAREKNSKDAQKMINEMQKRNRQTNERIEEIIRTTGKENAKYLIEKIKLHDMQEGKCLYSLEAIPLEDLLNNPFNYEVDHIIPRSVSFDNSFNNKVLVKQEENSKKGNRTPFQYLSSSDSKISYETFKKHILNLAKGKGRISKTKKEYLLEERDINRFSVQKDFINRNLVDTRYATRGLMNLLRSYFRVNNLDVKVKSINGGFTSFLRRKWKFKKERNKGYKHHAEDALIIANADFIFKEWKKLDKAKKVMENQMFEEKQAESMPEIETEQEYKEIFITPHQIKHIKDFKDYKYSHRVDKKPNRKLINDTLYSTRKDDKGNTLIVNNLNGLYDKDNDKLKKLINKSPEKLLMYHHDPQTYQKLKLIMEQYGDEKNPLYKYYEETGNYLTKYSKKDNGPVIKKIKYYGNKLNAHLDITDDYPNSRNKVVKLSLKPYRFDVYLDNGVYKFVTVKNLDVIKKENYYEVNSKCYEEAKKLKKISNQAEFIASFYKNDLIKINGELYRVIGVNNDLLNRIEVNMIDITYREYLENMNDKRPPHIIKTIASKTQSIKKYSTDILGNLYEVKSKKHPQIIKKGGSPKKKRKVSSDYKDHDGDYKDHDIDYKDDDDKSGGSGGSGGSTNLSDIIEKETGKQLVIQESILMLPEEVEEVIGNKPESDILVHTAYDESTDENVMLLTSDAPEYKPWALVIQDSNGENKIKMLSGGSGGSGGSTNLSDIIEKETGKQLVIQESILMLPEEVEEVIGNKPESDILVHTAYDESTDENVMLLTSDAPEYKPWALVIQDSNGENKIKMLSGGSKRTADGSEFESPKKKRKVE

SEQ ID NO: 449 - protein, 1326 aa, synthetic construct
  REGION 1..1326: note = Description of Artificial Sequence: synthetic polypeptide sequence
MSEVEFSHEYWMRHALTLAKRARDEREVPVGAVLVLNNRVIGEGWNRAIGLHDPTAHAEIMALRQGGLVMQNYRLYDATLYVTFEPCVMCAGAMIHSRIGRVVFGVRNAKTGAAGSLMDVLHHPGMNHRVEITEGILADECAALLCRFFRMPRRVFNAQKKAQSSTDGSSGSETPGTSESATPESSGAPKKKRKVGIHGVPAAATRSFILKIEPNEEVKKGLWKTHEVLNHGIAYYMNILKLIRQEAIYEHHEQDPKNPKKVSKAEIQAELWDFVLKMQKCNSFTHEVDKDEVFNILRELYEELVPSSVEKKGEANQLSNKFLYPLVDPNSQSGKGTASSGRKPRWYNLKIAGDPSWEEEKKKWEEDKKKDPLAKILGKLAEYGLIPLFIPYTDSNEPIVKEIKWMEKSRNQSVRRLDKDMFIQALERFLSWESWNLKVKEEYEKVEKEYKTLEERIKEDIQALKALEQYEKERQEQLLRDTLNTNEYRLSKRGLRGWREIIQKWLKMDENEPSEKYLEVFKDYQRKHPREAGDYSVYEFLSKKENHFIWRNHPEYPYLYATFCEIDKKKKDAKQQATFTLADPINHPLWVRFEERSGSNLNKYRILTEQLHTEKLKKKLTVQLDRLIYPTESGGWEEKGKVDIVLLPSRQFYNQIFLDIEEKGKHAFTYKDESIKFPLKGTLGGARVQFDRDHLRRYPHKVESGNVGRIYFNMTVNIEPTESPVSKSLKIHRDDFPKVVNFKPKELTEWIKDSKGKKLKSGIESLEIGLRVMSIALGQRQAAAASIFEVVDQKPDIEGKLFFPIKGTELYAVHRASFNIKLPGETLVKSREVLRKAREDNLKLMNQKLNFLRNVLHFQQFEDITEREKRVTKWISRQENSDVPLVYQDELIQIRELMYKPYKDWVAFLKQLHKRLEVEIGKEVKHWRKSLSDGRKGLYGISLKNIDEIDRTRKFLLRWSLRPTEPGEVRRLEPGQRFAIDQLNHLNALKEDRLKKMANTIIMHALGYCYDVRKKKWQAKNPACQIILFEDLSNYNPYKERSRFENSRLMKWSRREIPRQVALQGEIYGLQVGEVGAQFSSRFHAKTGSPGIRCRVVTKEKLQDNRFFKNLQREGRLTLDKIAVLKEGDLYPDKGGEKFISLSKDRKCVTTHADINAAQNLQKRFWTRTHGFYKVYCKAYQVDGQTVYIPESKDQKQKIIEEFGEGYFILKDGVYEWVNAGKLKIKKGSSKQSSSELVDSDILKDSFDLASELKGEKLMLYRDPSGNVFPSDKWMAAGVFFGKLERILISKLTNQYSISTIEDDSSKQSMKRPAATKKAGQAKKKK

SEQ ID NO: 450 - protein, 1147 aa, synthetic construct; identical to SEQ ID NO: 16
  REGION 1..1147: note = Description of Artificial Sequence: synthetic polypeptide sequence

SEQ ID NO: 451 - DNA, 27 bp, synthetic construct
  misc_feature 1..27: note = Description of Artificial Sequence: synthetic oligonucleotide sequence
  source 1..27: mol_type = other DNA
tcgagctcggtacctaatacgactcac

SEQ ID NO: 452 - DNA, 149 bp, synthetic construct
  misc_feature 1..149: note = Description of Artificial Sequence: synthetic polynucleotide sequence
  source 1..149: mol_type = other DNA
ttttttttttttttttttttttttttttttttttttttttttttttttttttttttttttttttttttttttttttttttttttttttttttttttttttttttttttttttttttttttcttcctactcaggctttattcaaagacca

SEQ ID NO: 453 - RNA, 21 nt, synthetic construct
  misc_feature 1..21: note = Description of Artificial Sequence: synthetic oligonucleotide sequence
  source 1..21: mol_type = other RNA
aagagagaataagtaacccat

SEQ ID NO: 454 - RNA, 21 nt, synthetic construct
  misc_feature 1..21: note = Description of Artificial Sequence: synthetic oligonucleotide sequence
  source 1..21: mol_type = other RNA
aagcagcctagctcaggagaa

SEQ ID NO: 455 - RNA, 20 nt, synthetic construct
  misc_feature 1..20: note = Description of Artificial Sequence: synthetic oligonucleotide sequence
  source 1..20: mol_type = other RNA
aagtccactcattcttggca

SEQ ID NO: 456 - RNA, 21 nt, synthetic construct
  misc_feature 1..21: note = Description of Artificial Sequence: synthetic oligonucleotide sequence
  source 1..21: mol_type = other RNA
acgatgagaagccatcctgcc

SEQ ID NO: 457 - RNA, 20 nt, synthetic construct
  misc_feature 1..20: note = Description of Artificial Sequence: synthetic oligonucleotide sequence
  source 1..20: mol_type = other RNA
agacaaggttcatatttgta

SEQ ID NO: 458 - RNA, 20 nt, synthetic construct
  misc_feature 1..20: note = Description of Artificial Sequence: synthetic oligonucleotide sequence
  source 1..20: mol_type = other RNA
aggctgggagcagccatcac

SEQ ID NO: 459 - RNA, 20 nt, synthetic construct
  misc_feature 1..20: note = Description of Artificial Sequence: synthetic oligonucleotide sequence
  source 1..20: mol_type = other RNA
ataagtaacccatacaaata

SEQ ID NO: 460 - RNA, 20 nt, synthetic construct
  misc_feature 1..20: note = Description of Artificial Sequence: synthetic oligonucleotide sequence
  source 1..20: mol_type = other RNA
atactcacttctcctgagct

SEQ ID NO: 461 - RNA, 20 nt, synthetic construct
  misc_feature 1..20: note = Description of Artificial Sequence: synthetic oligonucleotide sequence
  source 1..20: mol_type = other RNA
attattgacttagtcaacaa

SEQ ID NO: 462 - RNA, 20 nt, synthetic construct
  misc_feature 1..20: note = Description of Artificial Sequence: synthetic oligonucleotide sequence
  source 1..20: mol_type = other RNA
caaatatgaaccttgtctag

SEQ ID NO: 463 - RNA, 21 nt, synthetic construct
  misc_feature 1..21: note = Description of Artificial Sequence: synthetic oligonucleotide sequence
  source 1..21: mol_type = other RNA
cagaagtccactcattcttgg

SEQ ID NO: 464 - RNA, 21 nt, synthetic construct
  misc_feature 1..21: note = Description of Artificial Sequence: synthetic oligonucleotide sequence
  source 1..21: mol_type = other RNA
caggctgggagcagccatcac

SEQ ID NO: 465 - RNA, 20 nt, synthetic construct
  misc_feature 1..20: note = Description of Artificial Sequence: synthetic oligonucleotide sequence
  source 1..20: mol_type = other RNA
ccatcctgccaagaatgagt

SEQ ID NO: 466 - RNA, 21 nt, synthetic construct
  misc_feature 1..21: note = Description of Artificial Sequence: synthetic oligonucleotide sequence
  source 1..21: mol_type = other RNA
cctgctgattctgattattga

SEQ ID NO: 467 - RNA, 21 nt, synthetic construct
  misc_feature 1..21: note = Description of Artificial Sequence: synthetic oligonucleotide sequence
  source 1..21: mol_type = other RNA
cgatgctctaatctctctaga

SEQ ID NO: 468 - RNA, 21 nt, synthetic construct
  misc_feature 1..21: note = Description of Artificial Sequence: synthetic oligonucleotide sequence
  source 1..21: mol_type = other RNA
ctaagtcaataatcagaatca

SEQ ID NO: 469 - RNA, 21 nt, synthetic construct
  misc_feature 1..21: note = Description of Artificial Sequence: synthetic oligonucleotide sequence
  source 1..21: mol_type = other RNA
ctagacaaggttcatatttgt

SEQ ID NO: 470 - RNA, 20 nt, synthetic construct
  misc_feature 1..20: note = Description of Artificial Sequence: synthetic oligonucleotide sequence
  source 1..20: mol_type = other RNA
gaaccttgtctagagagatt

SEQ ID NO: 471 - RNA, 20 nt, synthetic construct
  misc_feature 1..20: note = Description of Artificial Sequence: synthetic oligonucleotide sequence
  source 1..20: mol_type = other RNA
gaagtccactcattcttggc

SEQ ID NO: 472 - RNA, 20 nt, synthetic construct
  misc_feature 1..20: note = Description of Artificial Sequence: synthetic oligonucleotide sequence
  source 1..20: mol_type = other RNA
gaatcagcaggtttgcagtc

SEQ ID NO: 473 - RNA, 20 nt, synthetic construct
  misc_feature 1..20: note = Description of Artificial Sequence: synthetic oligonucleotide sequence
  source 1..20: mol_type = other RNA
gaatgagtggacttctgtga

SEQ ID NO: 474 - RNA, 20 nt, synthetic construct
  misc_feature 1..20: note = Description of Artificial Sequence: synthetic oligonucleotide sequence
  source 1..20: mol_type = other RNA
gactgcaaacctgctgattc

SEQ ID NO: 475 - RNA, 21 nt, synthetic construct
  misc_feature 1..21: note = Description of Artificial Sequence: synthetic oligonucleotide sequence
  source 1..21: mol_type = other RNA
gacttagtcaacaaagagaga

SEQ ID NO: 476 - RNA, 20 nt, synthetic construct
  misc_feature 1..20: note = Description of Artificial Sequence: synthetic oligonucleotide sequence
  source 1..20: mol_type = other RNA
gataagcagcctagctcagg

SEQ ID NO: 477 - RNA, 20 nt, synthetic construct
  misc_feature 1..20: note = Description of Artificial Sequence: synthetic oligonucleotide sequence
  source 1..20: mol_type = other RNA
gatgagaagccatcctgcca

SEQ ID NO: 478 - RNA, 20 nt, synthetic construct
  misc_feature 1..20: note = Description of Artificial Sequence: synthetic oligonucleotide sequence
  source 1..20: mol_type = other RNA
gccatcctgccaagaatgag

SEQ ID NO: 479 - RNA, 20 nt, synthetic construct
  misc_feature 1..20: note = Description of Artificial Sequence: synthetic oligonucleotide sequence
  source 1..20: mol_type = other RNA
gcttttatactcacttctcc

SEQ ID NO: 480 - RNA, 21 nt, synthetic construct
  misc_feature 1..21: note = Description of Artificial Sequence: synthetic oligonucleotide sequence
  source 1..21: mol_type = other RNA
ggataagcagcctagctcagg

SEQ ID NO: 481 - RNA, 20 nt, synthetic construct
  misc_feature 1..20: note = Description of Artificial Sequence: synthetic oligonucleotide sequence
  source 1..20: mol_type = other RNA
gtctagagagattagagcat

SEQ ID NO: 482 - RNA, 20 nt, synthetic construct
  misc_feature 1..20: note = Description of Artificial Sequence: synthetic oligonucleotide sequence
  source 1..20: mol_type = other RNA
gtgatggctgctcccagcct

SEQ ID NO: 483 - RNA, 21 nt, synthetic construct
  misc_feature 1..21: note = Description of Artificial Sequence: synthetic oligonucleotide sequence
  source 1..21: mol_type = other RNA
tacttattctctctttgttga

SEQ ID NO: 484 - RNA, 21 nt, synthetic construct
  misc_feature 1..21: note = Description of Artificial Sequence: synthetic oligonucleotide sequence
  source 1..21: mol_type = other RNA
tattctctctttgttgactaa

SEQ ID NO: 485 - RNA, 20 nt, synthetic construct
  misc_feature 1..20: note = Description of Artificial Sequence: synthetic oligonucleotide sequence
  source 1..20: mol_type = other RNA
tattgacttagtcaacaaag

SEQ ID NO: 486 - RNA, 21 nt, synthetic construct
  misc_feature 1..21: note = Description of Artificial Sequence: synthetic oligonucleotide sequence
  source 1..21: mol_type = other RNA
tattgacttagtcaacaaaga

SEQ ID NO: 487 - RNA, 21 nt, synthetic construct
  misc_feature 1..21: note = Description of Artificial Sequence: synthetic oligonucleotide sequence
  source 1..21: mol_type = other RNA
tcagaatcagcaggtttgcag

SEQ ID NO: 488 - RNA, 20 nt, synthetic construct
  misc_feature 1..20: note = Description of Artificial Sequence: synthetic oligonucleotide sequence
  source 1..20: mol_type = other RNA
tccactcattcttggcagga

SEQ ID NO: 489 - RNA, 21 nt, synthetic construct
  misc_feature 1..21: note = Description of Artificial Sequence: synthetic oligonucleotide sequence
  source 1..21: mol_type = other RNA
tctctctttgttgactaagtc

SEQ ID NO: 490 - RNA, 21 nt, synthetic construct
  misc_feature 1..21: note = Description of Artificial Sequence: synthetic oligonucleotide sequence
  source 1..21: mol_type = other RNA
tgagaagccatcctgccaaga

SEQ ID NO: 491 - RNA, 21 nt, synthetic construct
  misc_feature 1..21: note = Description of Artificial Sequence: synthetic oligonucleotide sequence
  source 1..21: mol_type = other RNA
tgagctaggctgcttatccct

SEQ ID NO: 492 - RNA, 20 nt, synthetic construct
  misc_feature 1..20: note = Description of Artificial Sequence: synthetic oligonucleotide sequence
  source 1..20: mol_type = other RNA
tgagtataaaagccccaggc

SEQ ID NO: 493 - RNA, 20 nt, synthetic construct
  misc_feature 1..20: note = Description of Artificial Sequence: synthetic oligonucleotide sequence
  source 1..20: mol_type = other RNA
tgatggctgctcccagcctg

SEQ ID NO: 494 - RNA, 21 nt, synthetic construct
  misc_feature 1..21: note = Description of Artificial Sequence: synthetic oligonucleotide sequence
  source 1..21: mol_type = other RNA
tgccaagaatgagtggacttc

SEQ ID NO: 495 - RNA, 21 nt, synthetic construct
  misc_feature 1..21: note = Description of Artificial Sequence: synthetic oligonucleotide sequence
  source 1..21: mol_type = other RNA
tgccaatctgactgcaaacct

SEQ ID NO: 496 - RNA, 20 nt, synthetic construct
  misc_feature 1..20: note = Description of Artificial Sequence: synthetic oligonucleotide sequence
  source 1..20: mol_type = other RNA
tgttgactaagtcaataatc

SEQ ID NO: 497 - RNA, 20 nt, synthetic construct
  misc_feature 1..20: note = Description of Artificial Sequence: synthetic oligonucleotide sequence
  source 1..20: mol_type = other RNA
ttgacttagtcaacaaagag

SEQ ID NO: 498 - RNA, 21 nt, synthetic construct
  misc_feature 1..21: note = Description of Artificial Sequence: synthetic oligonucleotide sequence
  source 1..21: mol_type = other RNA
tttgttgactaagtcaataat

SEQ ID NO: 499 - RNA, 20 nt, Homo sapiens
  source 1..20: mol_type = other RNA
aacctgctgattctgattat

SEQ ID NO: 500 - DNA, 21 bp, Homo sapiens
  source 1..21: mol_type = other DNA
aagagagaataagtaacccat

SEQ ID NO: 501 - DNA, 21 bp, Homo sapiens
  source 1..21: mol_type = other DNA
aagcagcctagctcaggagaa

SEQ ID NO: 502 - DNA, 20 bp, Homo sapiens
  source 1..20: mol_type = other DNA
aagtccactcattcttggca

SEQ ID NO: 503 - DNA, 21 bp, Homo sapiens
  source 1..21: mol_type = other DNA
acgatgagaagccatcctgcc

SEQ ID NO: 504 - DNA, 20 bp, Homo sapiens
  source 1..20: mol_type = other DNA
agacaaggttcatatttgta

SEQ ID NO: 505 - DNA, 20 bp, Homo sapiens
  source 1..20: mol_type = other DNA
aggctgggagcagccatcac

SEQ ID NO: 506 - DNA, 20 bp, Homo sapiens
  source 1..20: mol_type = other DNA
ataagtaacccatacaaata

SEQ ID NO: 507 - DNA, 20 bp, Homo sapiens
  source 1..20: mol_type = other DNA
atactcacttctcctgagct

SEQ ID NO: 508 - DNA, 20 bp, Homo sapiens
  source 1..20: mol_type = other DNA
attattgacttagtcaacaa

SEQ ID NO: 509 - DNA, 20 bp, Homo sapiens
  source 1..20: mol_type = other DNA
caaatatgaaccttgtctag

SEQ ID NO: 510 - DNA, 21 bp, Homo sapiens
  source 1..21: mol_type = other DNA
cagaagtccactcattcttgg

SEQ ID NO: 511 - DNA, 21 bp, Homo sapiens
  source 1..21: mol_type = other DNA
caggctgggagcagccatcac

SEQ ID NO: 512 - DNA, 20 bp, Homo sapiens
  source 1..20: mol_type = other DNA
ccatcctgccaagaatgagt

SEQ ID NO: 513 - DNA, 21 bp, Homo sapiens
  source 1..21: mol_type = other DNA
cctgctgattctgattattga

SEQ ID NO: 514 - DNA, 21 bp, Homo sapiens
  source 1..21: mol_type = other DNA
cgatgctctaatctctctaga

SEQ ID NO: 515 - DNA, 21 bp, Homo sapiens
  source 1..21: mol_type = other DNA
ctaagtcaataatcagaatca

SEQ ID NO: 516 - DNA, 21 bp, Homo sapiens
  source 1..21: mol_type = other DNA
ctagacaaggttcatatttgt

SEQ ID NO: 517 - DNA, 20 bp, Homo sapiens
  source 1..20: mol_type = other DNA
gaaccttgtctagagagatt

SEQ ID NO: 518 - DNA, 20 bp, Homo sapiens
  source 1..20: mol_type = other DNA
gaagtccactcattcttggc

SEQ ID NO: 519 - DNA, 20 bp, Homo sapiens
  source 1..20: mol_type = other DNA
gaatcagcaggtttgcagtc

SEQ ID NO: 520 - DNA, 20 bp, Homo sapiens
  source 1..20: mol_type = other DNA
gaatgagtggacttctgtga

SEQ ID NO: 521 - DNA, 20 bp, Homo sapiens
  source 1..20: mol_type = other DNA
gactgcaaacctgctgattc

SEQ ID NO: 522 - DNA, 21 bp, Homo sapiens
  source 1..21: mol_type = other DNA
gacttagtcaacaaagagaga

SEQ ID NO: 523 - DNA, 20 bp, Homo sapiens
  source 1..20: mol_type = other DNA
gataagcagcctagctcagg

SEQ ID NO: 524 - DNA, 20 bp, Homo sapiens
  source 1..20: mol_type = other DNA
gatgagaagccatcctgcca

SEQ ID NO: 525 - DNA, 20 bp, Homo sapiens
  source 1..20: mol_type = other DNA
gccatcctgccaagaatgag

SEQ ID NO: 526 - DNA, 20 bp, Homo sapiens
  source 1..20: mol_type = other DNA
gcttttatactcacttctcc

SEQ ID NO: 527 - DNA, 21 bp, Homo sapiens
  source 1..21: mol_type = other DNA
ggataagcagcctagctcagg

SEQ ID NO: 528 - DNA, 20 bp, Homo sapiens
  source 1..20: mol_type = other DNA
gtctagagagattagagcat

SEQ ID NO: 529 - DNA, 20 bp, Homo sapiens
  source 1..20: mol_type = other DNA
gtgatggctgctcccagcct

SEQ ID NO: 530 - DNA, 21 bp, Homo sapiens
  source 1..21: mol_type = other DNA
tacttattctctctttgttga

SEQ ID NO: 531 - DNA, 21 bp, Homo sapiens
  source 1..21: mol_type = other DNA
tattctctctttgttgactaa

SEQ ID NO: 532 - DNA, 20 bp, Homo sapiens
  source 1..20: mol_type = other DNA
tattgacttagtcaacaaag

SEQ ID NO: 533 - DNA, 21 bp, Homo sapiens
  source 1..21: mol_type = other DNA
tattgacttagtcaacaaaga

SEQ ID NO: 534 - DNA, 21 bp, Homo sapiens
  source 1..21: mol_type = other DNA
tcagaatcagcaggtttgcag

SEQ ID NO: 535 - DNA, 20 bp, Homo sapiens
  source 1..20: mol_type = other DNA
tccactcattcttggcagga

SEQ ID NO: 536 - DNA, 21 bp, Homo sapiens
  source 1..21: mol_type = other DNA
tctctctttgttgactaagtc

SEQ ID NO: 537 - DNA, 21 bp, Homo sapiens
  source 1..21: mol_type = other DNA
tgagaagccatcctgccaaga

SEQ ID NO: 538 - DNA, 21 bp, Homo sapiens
  source 1..21: mol_type = other DNA
tgagctaggctgcttatccct

SEQ ID NO: 539 - DNA, 20 bp, Homo sapiens
  source 1..20: mol_type = other DNA
tgagtataaaagccccaggc

SEQ ID NO: 540 - DNA, 20 bp, Homo sapiens
  source 1..20: mol_type = other DNA
tgatggctgctcccagcctg

SEQ ID NO: 541 - DNA, 21 bp, Homo sapiens
  source 1..21: mol_type = other DNA
tgccaagaatgagtggacttc

SEQ ID NO: 542 - DNA, 21 bp, Homo sapiens
  source 1..21: mol_type = other DNA
tgccaatctgactgcaaacct

SEQ ID NO: 543 - DNA, 20 bp, Homo sapiens
  source 1..20: mol_type = other DNA
tgttgactaagtcaataatc

SEQ ID NO: 544 - DNA, 20 bp, Homo sapiens
  source 1..20: mol_type = other DNA
ttgacttagtcaacaaagag

SEQ ID NO: 545 - DNA, 21 bp, Homo sapiens
  source 1..21: mol_type = other DNA
tttgttgactaagtcaataat

SEQ ID NO: 546 - DNA, 20 bp, Homo sapiens
  source 1..20: mol_type = other DNA
aacctgctgattctgattat

SEQ ID NO: 547 - DNA, 251 bp, Homo sapiens
  source 1..251: mol_type = other DNA
ttccgatgctctaatctctctagacaaggttcatatttgtatgggttacttattctctctttgttgactaagtcaataatcagaatcagcaggtttgcagtcagattggcagggataagcagcctagctcaggagaagtgagtataaaagccccaggctgggagcagccatcacagaagtccactcattcttggcaggatggcttctcatcgtctgctcctcctctgccttgctggactggtatttgtgtc

SEQ ID NO: 548 - protein, 18 aa, Homo sapiens
MASHRLLLLCLAGLVFVS

SEQ ID NO: 549 - DNA, 226 bp, Homo sapiens
  source 1..226: mol_type = other DNA
ttccgatgctctaatctctctagacaaggttcatatttgtatgggttacttattctctctttgttgactaagtcaataatcagaatcagcaggtttgcagtcagattggcagggataagcagcctagctcaggagaagtgagtataaaagccccaggctgggagcagccatcacagaagtccactcattcttggcaggatggcttctcatcgtctgctcctcctct

SEQ ID NO: 550 - protein, 9 aa, Homo sapiens
MASHRLLLL

SEQ ID NO: 551 - RNA, 20 nt, synthetic construct
  misc_feature 1..20: note = Description of Artificial Sequence: synthetic oligonucleotide sequence
  source 1..20: mol_type = other RNA
caacttacccagaggcaaat

SEQ ID NO: 552 - RNA, 20 nt, synthetic construct
  misc_feature 1..20: note = Description of Artificial Sequence: synthetic oligonucleotide sequence
  source 1..20: mol_type = other RNA
aatggctcccaggtgtcatc

SEQ ID NO: 553 - RNA, 20 nt, synthetic construct
  misc_feature 1..20: note = Description of Artificial Sequence: synthetic oligonucleotide sequence
  source 1..20: mol_type = other RNA
ggctcccaggtgtcatcagc

SEQ ID NO: 554 - RNA, 20 nt, synthetic construct
  misc_feature 1..20: note = Description of Artificial Sequence: synthetic oligonucleotide sequence
  source 1..20: mol_type = other RNA
ctctcataggtggtattcac

SEQ ID NO: 555 - RNA, 20 nt, synthetic construct
  misc_feature 1..20: note = Description of Artificial Sequence: synthetic oligonucleotide sequence
  source 1..20: mol_type = other RNA
tataggaaaaccagtgagtc

SEQ ID NO: 556 - RNA, 20 nt, synthetic construct
  misc_feature 1..20: note = Description of Artificial Sequence: synthetic oligonucleotide sequence
  source 1..20: mol_type = other RNA
tactcacctctgcatgctca

SEQ ID NO: 557 - RNA, 20 nt, synthetic construct
  misc_feature 1..20: note = Description of Artificial Sequence: synthetic oligonucleotide sequence
  source 1..20: mol_type = other RNA
gcaacttacccagaggcaaa

SEQ ID NO: 558 - RNA, 20 nt, synthetic construct
  misc_feature 1..20: note = Description of Artificial Sequence: synthetic oligonucleotide sequence
  source 1..20: mol_type = other RNA
tctgtatactcacctctgca

SEQ ID NO: 559 - RNA, 20 nt, synthetic construct
  misc_feature 1..20: note = Description of Artificial Sequence: synthetic oligonucleotide sequence
  source 1..20: mol_type = other RNA
gaaacactcaccgtagggcc

SEQ ID NO: 560 - RNA, 20 nt, synthetic construct
  misc_feature 1..20: note = Description of Artificial Sequence: synthetic oligonucleotide sequence
  source 1..20: mol_type = other RNA
ctctacacccagggcaccgg

SEQ ID NO: 561 - RNA, 20 nt, synthetic construct
  misc_feature 1..20: note = Description of Artificial Sequence: synthetic oligonucleotide sequence
  source 1..20: mol_type = other RNA
acaccttataggaaaaccag

SEQ ID NO: 562 - RNA, 20 nt, synthetic construct
  misc_feature 1..20: note = Description of Artificial Sequence: synthetic oligonucleotide sequence
  source 1..20: mol_type = other RNA
ataggaaaaccagtgagtct

SEQ ID NO: 563 - RNA, 20 nt, synthetic construct
  misc_feature 1..20: note = Description of Artificial Sequence: synthetic oligonucleotide sequence
  source 1..20: mol_type = other RNA
actcacctctgcatgctcat

SEQ ID NO: 564 - RNA, 20 nt, synthetic construct
  misc_feature 1..20: note = Description of Artificial Sequence: synthetic oligonucleotide sequence
  source 1..20: mol_type = other RNA
ctcaccgtagggccagcctc

SEQ ID NO: 565 - RNA, 20 nt, synthetic construct
  misc_feature 1..20: note = Description of Artificial Sequence: synthetic oligonucleotide sequence
  source 1..20: mol_type = other RNA
aaaggctgctgatgacacct

SEQ ID NO: 566 - DNA, 20 bp, Homo sapiens
  source 1..20: mol_type = other DNA
caacttacccagaggcaaat

SEQ ID NO: 567 - DNA, 20 bp, Homo sapiens
  source 1..20: mol_type = other DNA
aatggctcccaggtgtcatc

SEQ ID NO: 568 - DNA, 20 bp, Homo sapiens
  source 1..20: mol_type = other DNA
ggctcccaggtgtcatcagc

SEQ ID NO: 569 - DNA, 20 bp, Homo sapiens
  source 1..20: mol_type = other DNA
ctctcataggtggtattcac

SEQ ID NO: 570 - DNA, 20 bp, Homo sapiens
  source 1..20: mol_type = other DNA
tataggaaaaccagtgagtc

SEQ ID NO: 571 - DNA, 20 bp, Homo sapiens
  source 1..20: mol_type = other DNA
tactcacctctgcatgctca

SEQ ID NO: 572 - DNA, 20 bp, Homo sapiens
  source 1..20: mol_type = other DNA
gcaacttacccagaggcaaa

SEQ ID NO: 573 - DNA, 20 bp, Homo sapiens
  source 1..20: mol_type = other DNA
tctgtatactcacctctgca

SEQ ID NO: 574 - DNA, 20 bp, Homo sapiens
  source 1..20: mol_type = other DNA
gaaacactcaccgtagggcc

SEQ ID NO: 575 - DNA, 20 bp, Homo sapiens
  source 1..20: mol_type = other DNA
ctctacacccagggcaccgg

SEQ ID NO: 576 - DNA, 20 bp, Homo sapiens
  source 1..20: mol_type = other DNA
acaccttataggaaaaccag

SEQ ID NO: 577 - DNA, 20 bp, Homo sapiens
  source 1..20: mol_type = other DNA
ataggaaaaccagtgagtct

SEQ ID NO: 578 - DNA, 20 bp, Homo sapiens
  source 1..20: mol_type = other DNA
actcacctctgcatgctcat

SEQ ID NO: 579 - DNA, 20 bp, Homo sapiens
  source 1..20: mol_type = other DNA
ctcaccgtagggccagcctc

SEQ ID NO: 580 - DNA, 20 bp, Homo sapiens
  source 1..20: mol_type = other DNA
aaaggctgctgatgacacct

SEQ ID NO: 581 - RNA, 20 nt, synthetic construct
  misc_feature 1..20: note = Description of Artificial Sequence: synthetic oligonucleotide sequence
  source 1..20: mol_type = other RNA
caggatccgcacagactcca

SEQ ID NO: 582 - DNA, 71 bp, Mus musculus
  source 1..71: mol_type = other DNA
ggcaaggttcatatttgtgtaggttacttattctccttttgttgactaagtcaataatcagaatcagcagg

SEQ ID NO: 583 - DNA, 23 bp, Homo sapiens
  source 1..23: mol_type = other DNA
caacttacccagaggcaaatggc

SEQ ID NO: 584 - DNA, 23 bp, Homo sapiens
  source 1..23: mol_type = other DNA
aatggctcccaggtgtcatcagc

SEQ ID NO: 585 - DNA, 23 bp, Homo sapiens
  source 1..23: mol_type = other DNA
ggctcccaggtgtcatcagcagc

SEQ ID NO: 586 - DNA, 23 bp, Homo sapiens
  source 1..23: mol_type = other DNA
ctctcataggtggtattcacagc

SEQ ID NO: 587 - DNA, 23 bp, Homo sapiens
  source 1..23: mol_type = other DNA
tataggaaaaccagtgagtctgg

SEQ ID NO: 588 - DNA, 23 bp, Homo sapiens
  source 1..23: mol_type = other DNA
tactcacctctgcatgctcatgg

SEQ ID NO: 589 - DNA, 23 bp, Homo sapiens
  source 1..23: mol_type = other DNA
gcaacttacccagaggcaaatgg

SEQ ID NO: 590 - DNA, 23 bp, Homo sapiens
  source 1..23: mol_type = other DNA
tctgtatactcacctctgcatgc

SEQ ID NO: 591 - DNA, 23 bp, Homo sapiens
  source 1..23: mol_type = other DNA
gaaacactcaccgtagggccagc

SEQ ID NO: 592 - DNA, 23 bp, Homo sapiens
  source 1..23: mol_type = other DNA
ctctacacccagggcaccggtga

SEQ ID NO: 593 - DNA, 23 bp, Homo sapiens
  source 1..23: mol_type = other DNA
acaccttataggaaaaccagtga

SEQ ID NO: 594 - DNA, 23 bp, Homo sapiens
  source 1..23: mol_type = other DNA
ataggaaaaccagtgagtctgga

SEQ ID NO: 595 - DNA, 23 bp, Homo sapiens
  source 1..23: mol_type = other DNA
actcacctctgcatgctcatgga

SEQ ID NO: 596 - DNA, 23 bp, Homo sapiens
  source 1..23: mol_type = other DNA
ctcaccgtagggccagcctcaga

SEQ ID NO: 597 - RNA, 100 nt, synthetic construct
  misc_feature 1..100: note = Description of Artificial Sequence: synthetic polynucleotide sequence
  source 1..100: mol_type = other RNA
caacttacccagaggcaaatgttttagagctagaaatagcaagttaaaataaggctagtccgttatcaacttgaaaaagtggcaccgagtcggtgctttt

SEQ ID NO: 598 - RNA, 100 nt, synthetic construct
  misc_feature 1..100: note = Description of Artificial Sequence: synthetic polynucleotide sequence
  source 1..100: mol_type = other RNA
aatggctcccaggtgtcatcgttttagagctagaaatagcaagttaaaataaggctagtccgttatcaacttgaaaaagtggcaccgagtcggtgctttt

SEQ ID NO: 599 - RNA, 100 nt, synthetic construct
  misc_feature 1..100: note = Description of Artificial Sequence: synthetic polynucleotide sequence
  source 1..100: mol_type = other RNA
ggctcccaggtgtcatcagcgttttagagctagaaatagcaagttaaaataaggctagtccgttatcaacttgaaaaagtggcaccgagtcggtgctttt

SEQ ID NO: 600 - RNA, 100 nt, synthetic construct
  misc_feature 1..100: note = Description of Artificial Sequence: synthetic polynucleotide sequence
  source 1..100: mol_type = other RNA
ctctcataggtggtattcacgttttagagctagaaatagcaagttaaaataaggctagtccgttatcaacttgaaaaagtggcaccgagtcggtgctttt

SEQ ID NO: 601 - RNA, 100 nt, synthetic construct; identical to SEQ ID NO: 394
  misc_feature 1..100: note = Description of Artificial Sequence: synthetic polynucleotide sequence
  source 1..100: mol_type = other RNA

SEQ ID NO: 602 - RNA, 100 nt, synthetic construct; identical to SEQ ID NO: 395
  misc_feature 1..100: note = Description of Artificial Sequence: synthetic polynucleotide sequence
  source 1..100: mol_type = other RNA

SEQ ID NO: 603 - RNA, 100 nt, synthetic construct
  misc_feature 1..100: note = Description of Artificial Sequence: synthetic polynucleotide sequence
  source 1..100: mol_type = other RNA
gcaacttacccagaggcaaagttttagagctagaaatagcaagttaaaataaggctagtccgttatcaacttgaaaaagtggcaccgagtcggtgctttt

SEQ ID NO: 604 - RNA, 100 nt, synthetic construct
  misc_feature 1..100: note = Description of Artificial Sequence: synthetic polynucleotide sequence
  source 1..100: mol_type = other RNA
tctgtatactcacctctgcagttttagagctagaaatagcaagttaaaataaggctagtccgttatcaacttgaaaaagtggcaccgagtcggtgctttt

SEQ ID NO: 605 - RNA, 100 nt, synthetic construct
  misc_feature 1..100: note = Description of Artificial Sequence: synthetic polynucleotide sequence
  source 1..100: mol_type = other RNA
gaaacactcaccgtagggccgttttagagctagaaatagcaagttaaaataaggctagtccgttatcaacttgaaaaagtggcaccgagtcggtgctttt

SEQ ID NO: 606 - RNA, 100 nt, synthetic construct
  misc_feature 1..100: note = Description of Artificial Sequence: synthetic polynucleotide sequence
  source 1..100: mol_type = other RNA
ctctacacccagggcaccgggttttagagctagaaatagcaagttaaaataaggctagtccgttatcaacttgaaaaagtggcaccgagtcggtgctttt

SEQ ID NO: 607 - RNA, 100 nt, synthetic construct
  misc_feature 1..100: note = Description of Artificial Sequence: synthetic polynucleotide sequence
  source 1..100: mol_type = other RNA
acaccttataggaaaaccaggttttagagctagaaatagcaagttaaaataaggctagtccgttatcaacttgaaaaagtggcaccgagtcggtgctttt

SEQ ID NO: 608 - RNA, 100 nt, synthetic construct
  misc_feature 1..100: note = Description of Artificial Sequence: synthetic polynucleotide sequence
  source 1..100: mol_type = other RNA
ataggaaaaccagtgagtctgttttagagctagaaatagcaagttaaaataaggctagtccgttatcaacttgaaaaagtggcaccgagtcggtgctttt

SEQ ID NO: 609 - RNA, 100 nt, synthetic construct; identical to SEQ ID NO: 396
  misc_feature 1..100: note = Description of Artificial Sequence: synthetic polynucleotide sequence
  source 1..100: mol_type = other RNA

SEQ ID NO: 610 - RNA, 100 nt, synthetic construct
  misc_feature 1..100: note = Description of Artificial Sequence: synthetic polynucleotide sequence
  source 1..100: mol_type = other RNA
ctcaccgtagggccagcctcgttttagagctagaaatagcaagttaaaataaggctagtccgttatcaacttgaaaaagtggcaccgagtcggtgctttt

SEQ ID NO: 611 - RNA, 20 nt, synthetic construct
  misc_feature 1..20: note = Description of Artificial Sequence: synthetic oligonucleotide sequence
  source 1..20: mol_type = other RNA
aaaagccccaggctgggagc

SEQ ID NO: 612 - RNA, 20 nt, synthetic construct
  misc_feature 1..20: note = Description of Artificial Sequence: synthetic oligonucleotide sequence
  source 1..20: mol_type = other RNA
aagtgagtataaaagcccca

SEQ ID NO: 613 - RNA, 21 nt, synthetic construct
  misc_feature 1..21: note = Description of Artificial Sequence: synthetic oligonucleotide sequence
  source 1..21: mol_type = other RNA
aataatcagaatcagcaggtt

SEQ ID NO: 614 - RNA, 20 nt, synthetic construct
  misc_feature 1..20: note = Description of Artificial Sequence: synthetic oligonucleotide sequence
  source 1..20: mol_type = other RNA
aatatgaaccttgtctagag

SEQ ID NO: 615 - RNA, 20 nt, synthetic construct
  misc_feature 1..20: note = Description of Artificial Sequence: synthetic oligonucleotide sequence
  source 1..20: mol_type = other RNA
aatgagtggacttctgtgat

SEQ ID NO: 616 - RNA, 21 nt, synthetic construct
  misc_feature 1..21: note = Description of Artificial Sequence: synthetic oligonucleotide sequence
  source 1..21: mol_type = other RNA
acaaatatgaaccttgtctag

SEQ ID NO: 617 - RNA, 20 nt, synthetic construct
  misc_feature 1..20: note = Description of Artificial Sequence: synthetic oligonucleotide sequence
  source 1..20: mol_type = other RNA
acagaagtccactcattctt

SEQ ID NO: 618 - RNA, 20 nt, synthetic construct
  misc_feature 1..20: note = Description of Artificial Sequence: synthetic oligonucleotide sequence
  source 1..20: mol_type = other RNA
accttgtctagagagattag

SEQ ID NO: 619 - RNA, 20 nt, synthetic construct
  misc_feature 1..20: note = Description of Artificial Sequence: synthetic oligonucleotide sequence
  source 1..20: mol_type = other RNA
agaagccatcctgccaagaa

SEQ ID NO: 620 - RNA, 20 nt, synthetic construct
  misc_feature 1..20: note = Description of Artificial Sequence: synthetic oligonucleotide sequence
  source 1..20: mol_type = other RNA
agcaggtttgcagtcagatt

SEQ ID NO: 621 - RNA, 20 nt, synthetic construct
  misc_feature 1..20: note = Description of Artificial Sequence: synthetic oligonucleotide sequence
  source 1..20: mol_type = other RNA
agggataagcagcctagctc

SEQ ID NO: 622 - RNA, 20 nt, synthetic construct
  misc_feature 1..20: note = Description of Artificial Sequence: synthetic oligonucleotide sequence
  source 1..20: mol_type = other RNA
aggtttgcagtcagattggc

SEQ ID NO: 623 - RNA, 20 nt, synthetic construct
  misc_feature 1..20: note = Description of Artificial Sequence: synthetic oligonucleotide sequence
  source 1..20: mol_type = other RNA
agtataaaagccccaggctg

SEQ ID NO: 624 - RNA, 20 nt, synthetic construct
  misc_feature 1..20: note = Description of Artificial Sequence: synthetic oligonucleotide sequence
  source 1..20: mol_type = other RNA
agtcaataatcagaatcagc

SEQ ID NO: 625 - RNA, 20 nt, synthetic construct
  misc_feature 1..20: note = Description of Artificial Sequence: synthetic oligonucleotide sequence
  source 1..20: mol_type = other RNA
ataatcagaatcagcaggtt

SEQ ID NO: 626 - RNA, 22 nt, synthetic construct
  misc_feature 1..22: note = Description of Artificial Sequence: synthetic oligonucleotide sequence
  source 1..22: mol_type = other RNA
ttgacttagtcaacaaagagag

SEQ ID NO: 627 - RNA, 22 nt, synthetic construct
  misc_feature 1..22: note = Description of Artificial Sequence: synthetic oligonucleotide sequence
  source 1..22: mol_type = other RNA
tctctttgttgactaagtcaat

SEQ ID NO: 628 - RNA, 22 nt, synthetic construct
  misc_feature 1..22: note = Description of Artificial Sequence: synthetic oligonucleotide sequence
  source 1..22: mol_type = other RNA
tgattattgacttagtcaacaa

SEQ ID NO: 629 - RNA, 22 nt, synthetic construct
  misc_feature 1..22: note = Description of Artificial Sequence: synthetic oligonucleotide sequence
  source 1..22: mol_type = other RNA
ttggcaggatggcttctcatcg

SEQ ID NO: 630 - RNA, 22 nt, synthetic construct
  misc_feature 1..22: note = Description of Artificial Sequence: synthetic oligonucleotide sequence
  source 1..22: mol_type = other RNA
acttagtcaacaaagagagaat

SEQ ID NO: 631 - RNA, 22 nt, synthetic construct
  misc_feature 1..22: note = Description of Artificial Sequence: synthetic oligonucleotide sequence
  source 1..22: mol_type = other RNA
gcagggataagcagcctagctc

SEQ ID NO: 632 - RNA, 22 nt, synthetic construct
  misc_feature 1..22: note = Description of Artificial Sequence: synthetic oligonucleotide sequence
  source 1..22: mol_type = other RNA
gtatgggttacttattctctct

SEQ ID NO: 633 - RNA, 20 nt, synthetic construct
  misc_feature 1..20: note = Description of Artificial Sequence: synthetic oligonucleotide sequence
  source 1..20: mol_type = other RNA
caagaatgagtggacttctg

SEQ ID NO: 634 - RNA, 20 nt, synthetic construct
  misc_feature 1..20: note = Description of Artificial Sequence: synthetic oligonucleotide sequence
  source 1..20: mol_type = other RNA
caatctgactgcaaacctgc

SEQ ID NO: 635 - RNA, 20 nt, synthetic construct
  misc_feature 1..20: note = Description of Artificial Sequence: synthetic oligonucleotide sequence
  source 1..20: mol_type = other RNA
cacagaagtccactcattct

SEQ ID NO: 636 - RNA, 20 nt, synthetic construct
  misc_feature 1..20: note = Description of Artificial Sequence: synthetic oligonucleotide sequence
  source 1..20: mol_type = other RNA
cagacgatgagaagccatcc

SEQ ID NO: 637 - RNA, 20 nt, synthetic construct
  misc_feature 1..20: note = Description of Artificial Sequence: synthetic oligonucleotide sequence
  source 1..20: mol_type = other RNA
cagcaggtttgcagtcagat

SEQ ID NO: 638 - RNA, 20 nt, synthetic construct
  misc_feature 1..20: note = Description of Artificial Sequence: synthetic oligonucleotide sequence
  source 1..20: mol_type = other RNA
caggatggcttctcatcgtc

SEQ ID NO: 639 - RNA, 21 nt, synthetic construct
  misc_feature 1..21: note = Description of Artificial Sequence: synthetic oligonucleotide sequence
  source 1..21: mol_type = other RNA
caggtttgcagtcagattggc

SEQ ID NO: 640 - RNA, 20 nt, synthetic construct
  misc_feature 1..20: note = Description of Artificial Sequence: synthetic oligonucleotide sequence
  source 1..20: mol_type = other RNA
cagtcagattggcagggata

SEQ ID NO: 641 - RNA, 20 nt, synthetic construct
  misc_feature 1..20: note = Description of Artificial Sequence: synthetic oligonucleotide sequence
  source 1..20: mol_type = other RNA
ccactcattcttggcaggat

SEQ ID NO: 642 - RNA, 20 nt, synthetic construct
  misc_feature 1..20: note = Description of Artificial Sequence: synthetic oligonucleotide sequence
  source 1..20: mol_type = other RNA
ctaagtcaataatcagaatc

SEQ ID NO: 643 - RNA, 22 nt, synthetic construct
  misc_feature 1..22: note = Description of Artificial Sequence: synthetic oligonucleotide sequence
  source 1..22: mol_type = other RNA
gtcaacaaagagagaataagta

SEQ ID NO: 644 - RNA, 20 nt, synthetic construct
  misc_feature 1..20: note = Description of Artificial Sequence: synthetic oligonucleotide sequence
  source 1..20: mol_type = other RNA
cttatccctgccaatctgac

SEQ ID NO: 645 - RNA, 22 nt, synthetic construct
  misc_feature 1..22: note = Description of Artificial Sequence: synthetic oligonucleotide sequence
  source 1..22: mol_type = other RNA
tccctgccaatctgactgcaaa

SEQ ID NO: 646 - RNA, 22 nt, synthetic construct
  misc_feature 1..22: note = Description of Artificial Sequence: synthetic oligonucleotide sequence
  source 1..22: mol_type = other RNA
ttctctctttgttgactaagtc

SEQ ID NO: 647 - RNA, 22 nt, synthetic construct
  misc_feature 1..22: note = Description of Artificial Sequence: synthetic oligonucleotide sequence
  source 1..22: mol_type = other RNA
tcctgagctaggctgcttatcc

SEQ ID NO: 648 - RNA, 20 nt, synthetic construct
  misc_feature 1..20: note = Description of Artificial Sequence: synthetic oligonucleotide sequence
  source 1..20: mol_type = other RNA
cttctgtgatggctgctccc

SEQ ID NO: 649 - RNA, 22 nt, synthetic construct
  misc_feature 1..22: note = Description of Artificial Sequence: synthetic oligonucleotide sequence
  source 1..22: mol_type = other RNA
tgtgatggctgctcccagcctg

SEQ ID NO: 650 - RNA, 22 nt, synthetic construct
  misc_feature 1..22: note = Description of Artificial Sequence: synthetic oligonucleotide sequence
  source 1..22: mol_type = other RNA
gcaggatggcttctcatcgtct

SEQ ID NO: 651 - RNA, 22 nt, synthetic construct
  misc_feature 1..22: note = Description of Artificial Sequence: synthetic oligonucleotide sequence
  source 1..22: mol_type = other RNA
tctagagagattagagcatcgg

SEQ ID NO: 652 - RNA, 22 nt, synthetic construct
  misc_feature 1..22: note = Description of Artificial Sequence: synthetic oligonucleotide sequence
  source 1..22: mol_type = other RNA
gttgactaagtcaataatcaga

SEQ ID NO: 653 - RNA, 22 nt, synthetic construct
  misc_feature 1..22: note = Description of Artificial Sequence: synthetic oligonucleotide sequence
  source 1..22: mol_type = other RNA
tatactcacttctcctgagcta

SEQ ID NO: 654 - RNA, 20 nt, synthetic construct
  misc_feature 1..20: note = Description of Artificial Sequence: synthetic oligonucleotide sequence
  source 1..20: mol_type = other RNA
gaagtgagtataaaagcccc

SEQ ID NO: 655 - RNA, 20 nt, synthetic construct
  misc_feature 1..20: note = Description of Artificial Sequence: synthetic oligonucleotide sequence
  source 1..20: mol_type = other RNA
gacaaggttcatatttgtat

SEQ ID NO: 656 - RNA, 20 nt, synthetic construct
  misc_feature 1..20: note = Description of Artificial Sequence: synthetic oligonucleotide sequence
  source 1..20: mol_type = other RNA
gagtataaaagccccaggct

SEQ ID NO: 657 - RNA, 20 nt, synthetic construct
  misc_feature 1..20: note = Description of Artificial Sequence: synthetic oligonucleotide sequence
  source 1..20: mol_type = other RNA
gagtggacttctgtgatggc

SEQ ID NO: 658 - RNA, 20 nt, synthetic construct
  misc_feature 1..20: note = Description of Artificial Sequence: synthetic oligonucleotide sequence
  source 1..20: mol_type = other RNA
gatggctgctcccagcctgg

SEQ ID NO: 659 - RNA, 20 nt, synthetic construct
  misc_feature 1..20: note = Description of Artificial Sequence: synthetic oligonucleotide sequence
  source 1..20: mol_type = other RNA
gcagcctagctcaggagaag

SEQ ID NO: 660 - RNA, 20 nt, synthetic construct
  misc_feature 1..20: note = Description of Artificial Sequence: synthetic oligonucleotide sequence
  source 1..20: mol_type = other RNA
gctgcttatccctgccaatc

SEQ ID NO: 661 - RNA, 20 nt, synthetic construct
  misc_feature 1..20: note = Description of Artificial Sequence: synthetic oligonucleotide sequence
  source 1..20: mol_type = other RNA
gggataagcagcctagctca

SEQ ID NO: 662 - RNA, 20 nt, synthetic construct
  misc_feature 1..20: note = Description of Artificial Sequence: synthetic oligonucleotide sequence
  source 1..20: mol_type = other RNA
ggtttgcagtcagattggca

SEQ ID NO: 663 - RNA, 20 nt, synthetic construct
  misc_feature 1..20: note = Description of Artificial Sequence: synthetic oligonucleotide sequence
  source 1..20: mol_type = other RNA
gttacttattctctctttgt

SEQ ID NO: 664 - RNA, 22 nt, synthetic construct
  misc_feature 1..22: note = Description of Artificial Sequence: synthetic oligonucleotide sequence
  source 1..22: mol_type = other RNA
cttattctctctttgttgacta

SEQ ID NO: 665 - RNA, 22 nt, synthetic construct
  misc_feature 1..22: note = Description of Artificial Sequence: synthetic oligonucleotide sequence
  source 1..22: mol_type = other RNA
atatttgtatgggttacttatt

SEQ ID NO: 666 - RNA, 22 nt, synthetic construct
  misc_feature 1..22: note = Description of Artificial Sequence: synthetic oligonucleotide sequence
  source 1..22: mol_type = other RNA
actaagtcaataatcagaatca

SEQ ID NO: 667 - RNA, 20 nt, synthetic construct
  misc_feature 1..20: note = Description of Artificial Sequence: synthetic oligonucleotide sequence
  source 1..20: mol_type = other RNA
gtttgcagtcagattggcag

SEQ ID NO: 668 - RNA, 22 nt, synthetic construct
  misc_feature 1..22: note = Description of Artificial Sequence: synthetic oligonucleotide sequence
  source 1..22: mol_type = other RNA
gcagtcagattggcagggataa

SEQ ID NO: 669 - RNA, 20 nt, synthetic construct
  misc_feature 1..20: note = Description of Artificial Sequence: synthetic oligonucleotide sequence
  source 1..20: mol_type = other RNA
tacaaatatgaaccttgtct

SEQ ID NO: 670 - RNA, 20 nt, synthetic construct
  misc_feature 1..20: note = Description of Artificial Sequence: synthetic oligonucleotide sequence
  source 1..20: mol_type = other RNA
tactcacttctcctgagcta

SEQ ID NO: 671 - RNA, 20 nt, synthetic construct
  misc_feature 1..20: note = Description of Artificial Sequence: synthetic oligonucleotide sequence
  source 1..20: mol_type = other RNA
tataaaagccccaggctggg

SEQ ID NO: 672 - RNA, 20 nt, synthetic construct
  misc_feature 1..20: note = Description of Artificial Sequence: synthetic oligonucleotide sequence
  source 1..20: mol_type = other RNA
tcacttctcctgagctaggc

SEQ ID NO: 673 - RNA, 20 nt, synthetic construct
  misc_feature 1..20: note = Description of Artificial Sequence: synthetic oligonucleotide sequence
  source 1..20: mol_type = other RNA
tcagattggcagggataagc

SEQ ID NO: 674 - RNA, 20 nt, synthetic construct
  misc_feature 1..20: note = Description of Artificial Sequence: synthetic oligonucleotide sequence
  source 1..20: mol_type = other RNA
tcaggagaagtgagtataaa

SEQ ID NO: 675 - RNA, 21 nt, synthetic construct
  misc_feature 1..21: note = Description of Artificial Sequence: synthetic oligonucleotide sequence
  source 1..21: mol_type = other RNA
tctgactgcaaacctgctgat

SEQ ID NO: 676 - RNA, 20 nt, synthetic construct
  misc_feature 1..20: note = Description of Artificial Sequence: synthetic oligonucleotide sequence
  source 1..20: mol_type = other RNA
tgagctaggctgcttatccc

SEQ ID NO: 677 - RNA, 20 nt, synthetic construct
  misc_feature 1..20: note = Description of Artificial Sequence: synthetic oligonucleotide sequence
  source 1..20: mol_type = other RNA
tgccaatctgactgcaaacc

SEQ ID NO: 678 - RNA, 20 nt, synthetic construct
  misc_feature 1..20: note = Description of Artificial Sequence: synthetic oligonucleotide sequence
  source 1..20: mol_type = other RNA
tgctctaatctctctagaca

SEQ ID NO: 679 - RNA, 20 nt, synthetic construct
  misc_feature 1..20: note = Description of Artificial Sequence: synthetic oligonucleotide sequence
  source 1..20: mol_type = other RNA
tgtgatggctgctcccagcc

SEQ ID NO: 680 - RNA, 20 nt, synthetic construct
  misc_feature 1..20: note = Description of Artificial Sequence: synthetic oligonucleotide sequence
  source 1..20: mol_type = other RNA
ttggcagggataagcagcct

SEQ ID NO: 681 - RNA, 20 nt, synthetic construct
  misc_feature 1..20: note = Description of Artificial Sequence: synthetic oligonucleotide sequence
  source 1..20: mol_type = other RNA
ttttatactcacttctcctg

SEQ ID NO: 682 - DNA, 20 bp, Homo sapiens
  source 1..20: mol_type = other DNA
aaaagccccaggctgggagc

SEQ ID NO: 683 - DNA, 20 bp, Homo sapiens
  source 1..20: mol_type = other DNA
aagtgagtataaaagcccca

SEQ ID NO: 684 - DNA, 21 bp, Homo sapiens
  source 1..21: mol_type = other DNA
aataatcagaatcagcaggtt

SEQ ID NO: 685 - DNA, 20 bp, Homo sapiens
  source 1..20: mol_type = other DNA
aatatgaaccttgtctagag

SEQ ID NO: 686 - DNA, 20 bp, Homo sapiens
  source 1..20: mol_type = other DNA
aatgagtggacttctgtgat

SEQ ID NO: 687 - DNA, 21 bp, Homo sapiens
  source 1..21: mol_type = other DNA
acaaatatgaaccttgtctag

SEQ ID NO: 688 - DNA, 20 bp, Homo sapiens
  source 1..20: mol_type = other DNA
acagaagtccactcattctt

SEQ ID NO: 689 - DNA, 20 bp, Homo sapiens
  source 1..20: mol_type = other DNA
accttgtctagagagattag

SEQ ID NO: 690 - DNA, 20 bp, Homo sapiens
  source 1..20: mol_type = other DNA
agaagccatcctgccaagaa

SEQ ID NO: 691 - DNA, 20 bp, Homo sapiens
  source 1..20: mol_type = other DNA
agcaggtttgcagtcagatt

SEQ ID NO: 692 - DNA, 20 bp, Homo sapiens
  source 1..20: mol_type = other DNA
agggataagcagcctagctc

SEQ ID NO: 693 - DNA, 20 bp, Homo sapiens
  source 1..20: mol_type = other DNA
aggtttgcagtcagattggc

SEQ ID NO: 694 - DNA, 20 bp, Homo sapiens
  source 1..20: mol_type = other DNA
agtataaaagccccaggctg

SEQ ID NO: 695 - DNA, 20 bp, Homo sapiens
  source 1..20: mol_type = other DNA
agtcaataatcagaatcagc

SEQ ID NO: 696 - DNA, 20 bp, Homo sapiens
  source 1..20: mol_type = other DNA
ataatcagaatcagcaggtt

SEQ ID NO: 697 - DNA, 22 bp, Homo sapiens
  source 1..22: mol_type = other DNA
ttgacttagtcaacaaagagag

SEQ ID NO: 698 - DNA, 22 bp, Homo sapiens
  source 1..22: mol_type = other DNA
tctctttgttgactaagtcaat

SEQ ID NO: 699 - DNA, 22 bp, Homo sapiens
  source 1..22: mol_type = other DNA
tgattattgacttagtcaacaa

SEQ ID NO: 700 - DNA, 22 bp, Homo sapiens
  source 1..22: mol_type = other DNA
ttggcaggatggcttctcatcg

SEQ ID NO: 701 - DNA, 22 bp, Homo sapiens
  source 1..22: mol_type = other DNA
acttagtcaacaaagagagaat

SEQ ID NO: 702 - DNA, 22 bp, Homo sapiens
  source 1..22: mol_type = other DNA
gcagggataagcagcctagctc

SEQ ID NO: 703 - DNA, 22 bp, Homo sapiens
  source 1..22: mol_type = other DNA
gtatgggttacttattctctct

SEQ ID NO: 704 - DNA, 20 bp, Homo sapiens
  source 1..20: mol_type = other DNA
caagaatgagtggacttctg

SEQ ID NO: 705 - DNA, 20 bp, Homo sapiens
  source 1..20: mol_type = other DNA
caatctgactgcaaacctgc

SEQ ID NO: 706 - DNA, 20 bp, Homo sapiens
  source 1..20: mol_type = other DNA
cacagaagtccactcattct

SEQ ID NO: 707 - DNA, 20 bp, Homo sapiens
  source 1..20: mol_type = other DNA
cagacgatgagaagccatcc

SEQ ID NO: 708 - DNA, 20 bp, Homo sapiens
  source 1..20: mol_type = other DNA
cagcaggtttgcagtcagat

SEQ ID NO: 709 - DNA, 20 bp, Homo sapiens
  source 1..20: mol_type = other DNA
caggatggcttctcatcgtc

SEQ ID NO: 710 - DNA, 21 bp, Homo sapiens
  source 1..21: mol_type = other DNA
caggtttgcagtcagattggc

SEQ ID NO: 711 - DNA, 20 bp, Homo sapiens
  source 1..20: mol_type = other DNA
cagtcagattggcagggata

SEQ ID NO: 712 - DNA, 20 bp, Homo sapiens
  source 1..20: mol_type = other DNA
ccactcattcttggcaggat

SEQ ID NO: 713 - DNA, 20 bp, Homo sapiens
  source 1..20: mol_type = other DNA
ctaagtcaataatcagaatc

SEQ ID NO: 714 - DNA, 22 bp, Homo sapiens
  source 1..22: mol_type = other DNA
gtcaacaaagagagaataagta

SEQ ID NO: 715 - DNA, 20 bp, Homo sapiens
  source 1..20: mol_type = other DNA
cttatccctgccaatctgac

SEQ ID NO: 716 - DNA, 22 bp, Homo sapiens
  source 1..22: mol_type = other DNA
tccctgccaatctgactgcaaa

SEQ ID NO: 717 - DNA, 22 bp, Homo sapiens
  source 1..22: mol_type = other DNA
ttctctctttgttgactaagtc

SEQ ID NO: 718 - DNA, 22 bp, Homo sapiens
  source 1..22: mol_type = other DNA
tcctgagctaggctgcttatcc

SEQ ID NO: 719 - DNA, 20 bp, Homo sapiens
  source 1..20: mol_type = other DNA
cttctgtgatggctgctccc

SEQ ID NO: 720 - DNA, 22 bp, Homo sapiens
  source 1..22: mol_type = other DNA
tgtgatggctgctcccagcctg

SEQ ID NO: 721 - DNA, 22 bp, Homo sapiens
  source 1..22: mol_type = other DNA
gcaggatggcttctcatcgtct

SEQ ID NO: 722 - DNA, 22 bp, Homo sapiens
  source 1..22: mol_type = other DNA
tctagagagattagagcatcgg

SEQ ID NO: 723 - DNA, 22 bp, Homo sapiens
  source 1..22: mol_type = other DNA
gttgactaagtcaataatcaga

SEQ ID NO: 724 - DNA, 22 bp, Homo sapiens
  source 1..22: mol_type = other DNA
tatactcacttctcctgagcta

SEQ ID NO: 725 - DNA, 20 bp, Homo sapiens
  source 1..20: mol_type = other DNA
gaagtgagtataaaagcccc

SEQ ID NO: 726 - DNA, 20 bp, Homo sapiens
  source 1..20: mol_type = other DNA
gacaaggttcatatttgtat

SEQ ID NO: 727 - DNA, 20 bp, Homo sapiens
  source 1..20: mol_type = other DNA
gagtataaaagccccaggct

SEQ ID NO: 728 - DNA, 20 bp, Homo sapiens
  source 1..20: mol_type = other DNA
gagtggacttctgtgatggc

SEQ ID NO: 729 - DNA, 20 bp, Homo sapiens
  source 1..20: mol_type = other DNA
gatggctgctcccagcctgg

SEQ ID NO: 730 - DNA, 20 bp, Homo sapiens
  source 1..20: mol_type = other DNA
gcagcctagctcaggagaag

SEQ ID NO: 731 - DNA, 20 bp, Homo sapiens
  source 1..20: mol_type = other DNA
gctgcttatccctgccaatc

SEQ ID NO: 732 - DNA, 20 bp, Homo sapiens
  source 1..20: mol_type = other DNA
gggataagcagcctagctca

SEQ ID NO: 733 - DNA, 20 bp, Homo sapiens
  source 1..20: mol_type = other DNA
ggtttgcagtcagattggca

SEQ ID NO: 734 - DNA, 20 bp, Homo sapiens
  source 1..20: mol_type = other DNA
gttacttattctctctttgt

SEQ ID NO: 735 - DNA, 22 bp, Homo sapiens
  source 1..22: mol_type = other DNA
cttattctctctttgttgacta

SEQ ID NO: 736 - DNA, 22 bp, Homo sapiens
  source 1..22: mol_type = other DNA
atatttgtatgggttacttatt

SEQ ID NO: 737 - DNA, 22 bp, Homo sapiens
  source 1..22: mol_type = other DNA
actaagtcaataatcagaatca

SEQ ID NO: 738 - DNA, 20 bp, Homo sapiens
  source 1..20: mol_type = other DNA
gtttgcagtcagattggcag

SEQ ID NO: 739 - DNA, 22 bp, Homo sapiens
  source 1..22: mol_type = other DNA
gcagtcagattggcagggataa

SEQ ID NO: 740 - DNA, 20 bp, Homo sapiens
  source 1..20: mol_type = other DNA
tacaaatatgaaccttgtct

SEQ ID NO: 741 - DNA, 20 bp, Homo sapiens
  source 1..20: mol_type = other DNA
tactcacttctcctgagcta

SEQ ID NO: 742 - DNA, 20 bp, Homo sapiens
  source 1..20: mol_type = other DNA
tataaaagccccaggctggg

SEQ ID NO: 743 - DNA, 20 bp, Homo sapiens
  source 1..20: mol_type = other DNA
tcacttctcctgagctaggc

SEQ ID NO: 744 - DNA, 20 bp, Homo sapiens
  source 1..20: mol_type = other DNA
tcagattggcagggataagc

SEQ ID NO: 745 - DNA, 20 bp, Homo sapiens
  source 1..20: mol_type = other DNA
tcaggagaagtgagtataaa

SEQ ID NO: 746 - DNA, 21 bp, Homo sapiens
  source 1..21: mol_type = other DNA
tctgactgcaaacctgctgat

SEQ ID NO: 747 - DNA, 20 bp, Homo sapiens
  source 1..20: mol_type = other DNA
tgagctaggctgcttatccc

SEQ ID NO: 748 - DNA, 20 bp, Homo sapiens
  source 1..20: mol_type = other DNA
tgccaatctgactgcaaacc

SEQ ID NO: 749 - DNA, 20 bp, Homo sapiens
  source 1..20: mol_type = other DNA
tgctctaatctctctagaca

SEQ ID NO: 750 - DNA, 20 bp, Homo sapiens
  source 1..20: mol_type = other DNA
tgtgatggctgctcccagcc

SEQ ID NO: 751 - DNA, 20 bp, Homo sapiens
  source 1..20: mol_type = other DNA
ttggcagggataagcagcct

SEQ ID NO: 752 - DNA, 20 bp, Homo sapiens
  source 1..20: mol_type = other DNA
ttttatactcacttctcctg

SEQ ID NO: 753 - RNA, 100 nt, synthetic construct
  misc_feature 1..100: note = Description of Artificial Sequence: synthetic polynucleotide sequence
  source 1..100: mol_type = other RNA
aacctgctgattctgattatgttttagagctagaaatagcaagttaaaataaggctagtccgttatcaacttgaaaaagtggcaccgagtcggtgctttt

SEQ ID NO: 754 - RNA, 109 nt, synthetic construct
  misc_feature 1..109: note = Description of Artificial Sequence: synthetic polynucleotide sequence
  source 1..109: mol_type = other RNA
aagagagaataagtaacccatgttttagtactctgtaatgaaaattacagaatctactaaaacaaggcaaaatgccgtgtttatctcgtcaacttgttggcgagatttt

SEQ ID NO: 755 - RNA, 109 nt, synthetic construct
  misc_feature 1..109: note = Description of Artificial Sequence: synthetic polynucleotide sequence
  source 1..109: mol_type = other RNA
aagcagcctagctcaggagaagttttagtactctgtaatgaaaattacagaatctactaaaacaaggcaaaatgccgtgtttatctcgtcaacttgttggcgagatttt

SEQ ID NO: 756 - RNA, 100 nt, synthetic construct
  misc_feature 1..100: note = Description of Artificial Sequence: synthetic polynucleotide sequence
  source 1..100: mol_type = other RNA
aagtccactcattcttggcagttttagagctagaaatagcaagttaaaataaggctagtccgttatcaacttgaaaaagtggcaccgagtcggtgctttt

SEQ ID NO: 757 - RNA, 109 nt, synthetic construct
  misc_feature 1..109: note = Description of Artificial Sequence: synthetic polynucleotide sequence
  source 1..109: mol_type = other RNA
acgatgagaagccatcctgccgttttagtactctgtaatgaaaattacagaatctactaaaacaaggcaaaatgccgtgtttatctcgtcaacttgttggcgagatttt

SEQ ID NO: 758 - RNA, 100 nt, synthetic construct
  misc_feature 1..100: note = Description of Artificial Sequence: synthetic polynucleotide sequence
  source 1..100: mol_type = other RNA
agacaaggttcatatttgtagttttagagctagaaatagcaagttaaaataaggctagtccgttatcaacttgaaaaagtggcaccgagtcggtgctttt

SEQ ID NO: 759 - RNA, 100 nt, synthetic construct
  misc_feature 1..100: note = Description of Artificial Sequence: synthetic polynucleotide sequence
  source 1..100: mol_type = other RNA
aggctgggagcagccatcacgttttagagctagaaatagcaagttaaaataaggctagtccgttatcaacttgaaaaagtggcaccgagtcggtgctttt

SEQ ID NO: 760 - RNA, 100 nt, synthetic construct
  misc_feature 1..100: note = Description of Artificial Sequence: synthetic polynucleotide sequence
  source 1..100: mol_type = other RNA
ataagtaacccatacaaatagttttagagctagaaatagcaagttaaaataaggctagtccgttatcaacttgaaaaagtggcaccgagtcggtgctttt

SEQ ID NO: 761 - RNA, 100 nt, synthetic construct
  misc_feature 1..100: note = Description of Artificial Sequence: synthetic polynucleotide sequence
  source 1..100: mol_type = other RNA
atactcacttctcctgagctgttttagagctagaaatagcaagttaaaataaggctagtccgttatcaacttgaaaaagtggcaccgagtcggtgctttt

SEQ ID NO: 762 - RNA, 100 nt, synthetic construct
  misc_feature 1..100: note = Description of Artificial Sequence: synthetic polynucleotide sequence
  source 1..100: mol_type = other RNA
attattgacttagtcaacaagttttagagctagaaatagcaagttaaaataaggctagtccgttatcaacttgaaaaagtggcaccgagtcggtgctttt

SEQ ID NO: 763 - RNA, 100 nt, synthetic construct
  misc_feature 1..100: note = Description of Artificial Sequence: synthetic polynucleotide sequence
  source 1..100: mol_type = other RNA
caaatatgaaccttgtctaggttttagagctagaaatagcaagttaaaataaggctagtccgttatcaacttgaaaaagtggcaccgagtcggtgctttt

SEQ ID NO: 764 - RNA, 109 nt, synthetic construct
  misc_feature 1..109: note = Description of Artificial Sequence: synthetic polynucleotide sequence
  source 1..109: mol_type = other RNA
cagaagtccactcattcttgggttttagtactctgtaatgaaaattacagaatctactaaaacaaggcaaaatgccgtgtttatctcgtcaacttgttggcgagatttt

SEQ ID NO: 765 - RNA, 109 nt, synthetic construct
  misc_feature 1..109: note = Description of Artificial Sequence: synthetic polynucleotide sequence
  source 1..109: mol_type = other RNA
caggctgggagcagccatcacgttttagtactctgtaatgaaaattacagaatctactaaaacaaggcaaaatgccgtgtttatctcgtcaacttgttggcgagatttt

SEQ ID NO: 766 - RNA, 100 nt, synthetic construct
  misc_feature 1..100: note = Description of Artificial Sequence: synthetic polynucleotide sequence
  source 1..100: mol_type = other RNA
ccatcctgccaagaatgagtgttttagagctagaaatagcaagttaaaataaggctagtccgttatcaacttgaaaaagtggcaccgagtcggtgctttt

SEQ ID NO: 767 - RNA, 109 nt, synthetic construct
  misc_feature 1..109: note = Description of Artificial Sequence: synthetic polynucleotide sequence
  source 1..109: mol_type = other RNA
cctgctgattctgattattgagttttagtactctgtaatgaaaattacagaatctactaaaacaaggcaaaatgccgtgtttatctcgtcaacttgttggcgagatttt

SEQ ID NO: 768 - RNA, 109 nt, synthetic construct
  misc_feature 1..109: note = Description of Artificial Sequence: synthetic polynucleotide sequence
  source 1..109: mol_type = other RNA
cgatgctctaatctctctagagttttagtactctgtaatgaaaattacagaatctactaaaacaaggcaaaatgccgtgtttatctcgtcaacttgttggcgagatttt

SEQ ID NO: 769 - RNA, 109 nt, synthetic construct
  misc_feature 1..109: note = Description of Artificial Sequence: synthetic polynucleotide sequence
  source 1..109: mol_type = other RNA
ctaagtcaataatcagaatcagttttagtactctgtaatgaaaattacagaatctactaaaacaaggcaaaatgccgtgtttatctcgtcaacttgttggcgagatttt

SEQ ID NO: 770 - RNA, 109 nt, synthetic construct
  misc_feature 1..109: note = Description of Artificial Sequence: synthetic polynucleotide sequence
  source 1..109: mol_type = other RNA
ctagacaaggttcatatttgtgttttagtactctgtaatgaaaattacagaatctactaaaacaaggcaaaatgccgtgtttatctcgtcaacttgttggcgagatttt

SEQ ID NO: 771 - RNA, 100 nt, synthetic construct
  misc_feature 1..100: note = Description of Artificial Sequence: synthetic polynucleotide sequence
  source 1..100: mol_type = other RNA
gaaccttgtctagagagattgttttagagctagaaatagcaagttaaaataaggctagtccgttatcaacttgaaaaagtggcaccgagtcggtgctttt

SEQ ID NO: 772 - RNA, 100 nt, synthetic construct
  misc_feature 1..100: note = Description of Artificial Sequence: synthetic polynucleotide sequence
  source 1..100: mol_type = other RNA
gaagtccactcattcttggcgttttagagctagaaatagcaagttaaaataaggctagtccgttatcaacttgaaaaagtggcaccgagtcggtgctttt

SEQ ID NO: 773 - RNA, 100 nt, synthetic construct
  misc_feature 1..100: note = Description of Artificial Sequence: synthetic polynucleotide sequence
  source 1..100: mol_type = other RNA
gaatcagcaggtttgcagtcgttttagagctagaaatagcaagttaaaataaggctagtccgttatcaacttgaaaaagtggcaccgagtcggtgctttt

SEQ ID NO: 774 - RNA, 100 nt, synthetic construct
  misc_feature 1..100: note = Description of Artificial Sequence: synthetic polynucleotide sequence
  source 1..100: mol_type = other RNA
gaatgagtggacttctgtgagttttagagctagaaatagcaagttaaaataaggctagtccgttatcaacttgaaaaagtggcaccgagtcggtgctttt

SEQ ID NO: 775 - RNA, 100 nt, synthetic construct
  misc_feature 1..100: note = Description of Artificial Sequence: synthetic polynucleotide sequence
  source 1..100: mol_type = other RNA
gactgcaaacctgctgattcgttttagagctagaaatagcaagttaaaataaggctagtccgttatcaacttgaaaaagtggcaccgagtcggtgctttt

SEQ ID NO: 776 - RNA, 109 nt, synthetic construct
  misc_feature 1..109: note = Description of Artificial Sequence: synthetic polynucleotide sequence
  source 1..109: mol_type = other RNA
gacttagtcaacaaagagagagttttagtactctgtaatgaaaattacagaatctactaaaacaaggcaaaatgccgtgtttatctcgtcaacttgttggcgagatttt

SEQ ID NO: 777 - RNA, 100 nt, synthetic construct
  misc_feature 1..100: note = Description of Artificial Sequence: synthetic polynucleotide sequence
  source 1..100: mol_type = other RNA
gataagcagcctagctcagggttttagagctagaaatagcaagttaaaataaggctagtccgttatcaacttgaaaaagtggcaccgagtcggtgctttt

SEQ ID NO: 778 - RNA, 100 nt, synthetic construct
  misc_feature 1..100: note = Description of Artificial Sequence: synthetic polynucleotide sequence
  source 1..100: mol_type = other RNA
gatgagaagccatcctgccagttttagagctagaaatagcaagttaaaataaggctagtccgttatcaacttgaaaaagtggcaccgagtcggtgctttt

SEQ ID NO: 779 - RNA, 100 nt, synthetic construct
  misc_feature 1..100: note = Description of Artificial Sequence: synthetic polynucleotide sequence
  source 1..100: mol_type = other RNA
gccatcctgccaagaatgaggttttagagctagaaatagcaagttaaaataaggctagtccgttatcaacttgaaaaagtggcaccgagtcggtgctttt

SEQ ID NO: 780 - RNA, 100 nt, synthetic construct
  misc_feature 1..100: note = Description of Artificial Sequence: synthetic polynucleotide sequence
  source 1..100: mol_type = other RNA
gcttttatactcacttctccgttttagagctagaaatagcaagttaaaataaggctagtccgttatcaacttgaaaaagtggcaccgagtcggtgctttt

SEQ ID NO: 781 - RNA, 109 nt, synthetic construct
  misc_feature 1..109: note = Description of Artificial Sequence: synthetic polynucleotide sequence
  source 1..109: mol_type = other RNA
ggataagcagcctagctcagggttttagtactctgtaatgaaaattacagaatctactaaaacaaggcaaaatgccgtgtttatctcgtcaacttgttggcgagatttt

SEQ ID NO: 782 - RNA, 100 nt, synthetic construct
  misc_feature 1..100: note = Description of Artificial Sequence: synthetic polynucleotide sequence
  source 1..100: mol_type = other RNA
gtctagagagattagagcatgttttagagctagaaatagcaagttaaaataaggctagtccgttatcaacttgaaaaagtggcaccgagtcggtgctttt

SEQ ID NO: 783 - RNA, 100 nt, synthetic construct
  misc_feature 1..100: note = Description of Artificial Sequence: synthetic polynucleotide sequence
  source 1..100: mol_type = other RNA
gtgatggctgctcccagcctgttttagagctagaaatagcaagttaaaataaggctagtccgttatcaacttgaaaaagtggcaccgagtcggtgctttt

SEQ ID NO: 784 - RNA, 109 nt, synthetic construct
  misc_feature 1..109: note = Description of Artificial Sequence: synthetic polynucleotide sequence
  source 1..109: mol_type = other RNA
tacttattctctctttgttgagttttagtactctgtaatgaaaattacagaatctactaaaacaaggcaaaatgccgtgtttatctcgtcaacttgttggcgagatttt

SEQ ID NO: 785 - RNA, 109 nt, synthetic construct
  misc_feature 1..109: note = Description of Artificial Sequence: synthetic polynucleotide sequence
  source 1..109: mol_type = other RNA
tattctctctttgttgactaagttttagtactctgtaatgaaaattacagaatctactaaaacaaggcaaaatgccgtgtttatctcgtcaacttgttggcgagatttt

SEQ ID NO: 786 - RNA, 100 nt, synthetic construct
  misc_feature 1..100: note = Description of Artificial Sequence: synthetic polynucleotide sequence
  source 1..100: mol_type = other RNA
tattgacttagtcaacaaaggttttagagctagaaatagcaagttaaaataaggctagtccgttatcaacttgaaaaagtggcaccgagtcggtgctttt

SEQ ID NO: 787 - RNA, 109 nt, synthetic construct
  misc_feature 1..109: note = Description of Artificial Sequence: synthetic polynucleotide sequence
  source 1..109: mol_type = other RNA
tattgacttagtcaacaaagagttttagtactctgtaatgaaaattacagaatctactaaaacaaggcaaaatgccgtgtttatctcgtcaacttgttggcgagatttt

SEQ ID NO: 788 - RNA, 109 nt, synthetic construct
  misc_feature 1..109: note = Description of Artificial Sequence: synthetic polynucleotide sequence
  source 1..109: mol_type = other RNA
tcagaatcagcaggtttgcaggttttagtactctgtaatgaaaattacagaatctactaaaacaaggcaaaatgccgtgtttatctcgtcaacttgttggcgagatttt

SEQ ID NO: 789 - RNA, 100 nt, synthetic construct
  misc_feature 1..100: note = Description of Artificial Sequence: synthetic polynucleotide sequence
  source 1..100: mol_type = other RNA
tccactcattcttggcaggagttttagagctagaaatagcaagttaaaataaggctagtccgttatcaacttgaaaaagtggcaccgagtcggtgctttt

SEQ ID NO: 790 - RNA, 109 nt, synthetic construct
  misc_feature 1..109: note = Description of Artificial Sequence: synthetic polynucleotide sequence
  source 1..109: mol_type = other RNA
tctctctttgttgactaagtcgttttagtactctgtaatgaaaattacagaatctactaaaacaaggcaaaatgccgtgtttatctcgtcaacttgttggcgagatttt

SEQ ID NO: 791 - RNA, 109 nt, synthetic construct
  misc_feature 1..109: note = Description of Artificial Sequence: synthetic polynucleotide sequence
  source 1..109: mol_type = other RNA
tgagaagccatcctgccaagagttttagtactctgtaatgaaaattacagaatctactaaaacaaggcaaaatgccgtgtttatctcgtcaacttgttggcgagatttt

SEQ ID NO: 792 - RNA, 109 nt, synthetic construct
  misc_feature 1..109: note = Description of Artificial Sequence: synthetic polynucleotide sequence
  source 1..109: mol_type = other RNA
tgagctaggctgcttatccctgttttagtactctgtaatgaaaattacagaatctactaaaacaaggcaaaatgccgtgtttatctcgtcaacttgttggcgagatttt

SEQ ID NO: 793 - RNA, 100 nt, synthetic construct
  misc_feature 1..100: note = Description of Artificial Sequence: synthetic polynucleotide sequence
  source 1..100: mol_type = other RNA
tgagtataaaagccccaggcgttttagagctagaaatagcaagttaaaataaggctagtccgttatcaacttgaaaaagtggcaccgagtcggtgctttt

SEQ ID NO: 794 - RNA, 100 nt, synthetic construct
  misc_feature 1..100: note = Description of Artificial Sequence: synthetic polynucleotide sequence
  source 1..100: mol_type = other RNA
tgatggctgctcccagcctggttttagagctagaaatagcaagttaaaataaggctagtccgttatcaacttgaaaaagtggcaccgagtcggtgctttt

SEQ ID NO: 795 - RNA, 109 nt, synthetic construct
  misc_feature 1..109: note = Description of Artificial Sequence: synthetic polynucleotide sequence
  source 1..109: mol_type = other RNA
tgccaagaatgagtggacttcgttttagtactctgtaatgaaaattacagaatctactaaaacaaggcaaaatgccgtgtttatctcgtcaacttgttggcgagatttt

SEQ ID NO: 796 - RNA, 109 nt, synthetic construct
  misc_feature 1..109: note = Description of Artificial Sequence: synthetic polynucleotide sequence
  source 1..109: mol_type = other RNA
tgccaatctgactgcaaacctgttttagtactctgtaatgaaaattacagaatctactaaaacaaggcaaaatgccgtgtttatctcgtcaacttgttggcgagatttt

SEQ ID NO: 797 - RNA, 100 nt, synthetic construct
  misc_feature 1..100: note = Description of Artificial Sequence: synthetic polynucleotide sequence
  source 1..100: mol_type = other RNA
tgttgactaagtcaataatcgttttagagctagaaatagcaagttaaaataaggctagtccgttatcaacttgaaaaagtggcaccgagtcggtgctttt

SEQ ID NO: 798 - RNA, 100 nt, synthetic construct
  misc_feature 1..100: note = Description of Artificial Sequence: synthetic polynucleotide sequence
  source 1..100: mol_type = other RNA
ttgacttagtcaacaaagaggttttagagctagaaatagcaagttaaaataaggctagtccgttatcaacttgaaaaagtggcaccgagtcggtgctttt

SEQ ID NO: 799 - RNA, 109 nt, synthetic construct
  misc_feature 1..109: note = Description of Artificial Sequence: synthetic polynucleotide sequence
  source 1..109: mol_type = other RNA
tttgttgactaagtcaataatgttttagtactctgtaatgaaaattacagaatctactaaaacaaggcaaaatgccgtgtttatctcgtcaacttgttggcgagatttt

SEQ ID NO: 800 - RNA, 100 nt, synthetic construct
  misc_feature 1..100: note = Description of Artificial Sequence: synthetic polynucleotide sequence
  source 1..100: mol_type = other RNA
aaaagccccaggctgggagcgttttagagctagaaatagcaagttaaaataaggctagtccgttatcaacttgaaaaagtggcaccgagtcggtgctttt

SEQ ID NO: 801 - RNA, 100 nt, synthetic construct
  misc_feature 1..100: note = Description of Artificial Sequence: synthetic polynucleotide sequence
  source 1..100: mol_type = other RNA
aagtgagtataaaagccccagttttagagctagaaatagcaagttaaaataaggctagtccgttatcaacttgaaaaagtggcaccgagtcggtgctttt

SEQ ID NO: 802 - RNA, 109 nt, synthetic construct
  misc_feature 1..109: note = Description of Artificial Sequence: synthetic polynucleotide sequence
  source 1..109: mol_type = other RNA
aataatcagaatcagcaggttgttttagtactctgtaatgaaaattacagaatctactaaaacaaggcaaaatgccgtgtttatctcgtcaacttgttggcgagatttt

SEQ ID NO: 803 - RNA, 100 nt, synthetic construct
  misc_feature 1..100: note = Description of Artificial Sequence: synthetic polynucleotide sequence
  source 1..100: mol_type = other RNA
aatatgaaccttgtctagaggttttagagctagaaatagcaagttaaaataaggctagtccgttatcaacttgaaaaagtggcaccgagtcggtgctttt

SEQ ID NO: 804 - RNA, 100 nt, synthetic construct
  misc_feature 1..100: note = Description of Artificial Sequence: synthetic polynucleotide sequence
  source 1..100: mol_type = other RNA
aatgagtggacttctgtgatgttttagagctagaaatagcaagttaaaataaggctagtccgttatcaacttgaaaaagtggcaccgagtcggtgctttt

SEQ ID NO: 805 - RNA, 109 nt, synthetic construct
  misc_feature 1..109: note = Description of Artificial Sequence: synthetic polynucleotide sequence
  source 1..109: mol_type = other RNA
acaaatatgaaccttgtctaggttttagtactctgtaatgaaaattacagaatctactaaaacaaggcaaaatgccgtgtttatctcgtcaacttgttggcgagatttt

SEQ ID NO: 806 - RNA, 100 nt, synthetic construct
  misc_feature 1..100: note = Description of Artificial Sequence: synthetic polynucleotide sequence
  source 1..100: mol_type = other RNA
acagaagtccactcattcttgttttagagctagaaatagcaagttaaaataaggctagtccgttatcaacttgaaaaagtggcaccgagtcggtgctttt

SEQ ID NO: 807 - RNA, 100 nt, synthetic construct
  misc_feature 1..100: note = Description of Artificial Sequence: synthetic polynucleotide sequence
  source 1..100: mol_type = other RNA
accttgtctagagagattaggttttagagctagaaatagcaagttaaaataaggctagtccgttatcaacttgaaaaagtggcaccgagtcggtgctttt

SEQ ID NO: 808 - RNA, 100 nt, synthetic construct
  misc_feature 1..100: note = Description of Artificial Sequence: synthetic polynucleotide sequence
  source 1..100: mol_type = other RNA
agaagccatcctgccaagaagttttagagctagaaatagcaagttaaaataaggctagtccgttatcaacttgaaaaagtggcaccgagtcggtgctttt

SEQ ID NO: 809 - RNA, 100 nt, synthetic construct
  misc_feature 1..100: note = Description of Artificial Sequence: synthetic polynucleotide sequence
  source 1..100: mol_type = other RNA
agcaggtttgcagtcagattgttttagagctagaaatagcaagttaaaataaggctagtccgttatcaacttgaaaaagtggcaccgagtcggtgctttt

SEQ ID NO: 810 - RNA, 100 nt, synthetic construct
  misc_feature 1..100: note = Description of Artificial Sequence: synthetic polynucleotide sequence
  source 1..100: mol_type = other RNA
agggataagcagcctagctcgttttagagctagaaatagcaagttaaaataaggctagtccgttatcaacttgaaaaagtggcaccgagtcggtgctttt

SEQ ID NO: 811 - RNA, 100 nt, synthetic construct
  misc_feature 1..100: note = Description of Artificial Sequence: synthetic polynucleotide sequence
  source 1..100: mol_type = other RNA
aggtttgcagtcagattggcgttttagagctagaaatagcaagttaaaataaggctagtccgttatcaacttgaaaaagtggcaccgagtcggtgctttt

SEQ ID NO: 812 - RNA, 100 nt, synthetic construct
  misc_feature 1..100: note = Description of Artificial Sequence: synthetic polynucleotide sequence
  source 1..100: mol_type = other RNA
agtataaaagccccaggctggttttagagctagaaatagcaagttaaaataaggctagtccgttatcaacttgaaaaagtggcaccgagtcggtgctttt

SEQ ID NO: 813 - RNA, 100 nt, synthetic construct
  misc_feature 1..100: note = Description of Artificial Sequence: synthetic polynucleotide sequence
  source 1..100: mol_type = other RNA
agtcaataatcagaatcagcgttttagagctagaaatagcaagttaaaataaggctagtccgttatcaacttgaaaaagtggcaccgagtcggtgctttt

SEQ ID NO: 814 - RNA, 100 nt, synthetic construct
  misc_feature 1..100: note = Description of Artificial Sequence: synthetic polynucleotide sequence
  source 1..100: mol_type = other RNA
ataatcagaatcagcaggttgttttagagctagaaatagcaagttaaaataaggctagtccgttatcaacttgaaaaagtggcaccgagtcggtgctttt

SEQ ID NO: 815 - RNA, 119 nt, synthetic construct
  misc_feature 1..119: note = Description of Artificial Sequence: synthetic polynucleotide sequence
  source 1..119: mol_type = other RNA
gttctgtcttttggtcaggacaaccgtctagctataagtgctgcagggtgtgagaaactcctattgctggacgatgtctcttacgaggcattagcacttgacttagtcaacaaagagag

SEQ ID NO: 816 - RNA, 119 nt, synthetic construct
  misc_feature 1..119: note = Description of Artificial Sequence: synthetic polynucleotide sequence
  source 1..119: mol_type = other RNA
gttctgtcttttggtcaggacaaccgtctagctataagtgctgcagggtgtgagaaactcctattgctggacgatgtctcttacgaggcattagcactctctttgttgactaagtcaat

SEQ ID NO: 817 - RNA, 119 nt, synthetic construct
  misc_feature 1..119: note = Description of Artificial Sequence: synthetic polynucleotide sequence
  source 1..119: mol_type = other RNA
gttctgtcttttggtcaggacaaccgtctagctataagtgctgcagggtgtgagaaactcctattgctggacgatgtctcttacgaggcattagcactgattattgacttagtcaacaa

SEQ ID NO: 818 - RNA, 119 nt, synthetic construct; identical to SEQ ID NO: 400
  misc_feature 1..119: note = Description of Artificial Sequence: synthetic polynucleotide sequence
  source 1..119: mol_type = other RNA

SEQ ID NO: 819 - RNA, 119 nt, synthetic construct
  misc_feature 1..119: note = Description of Artificial Sequence: synthetic polynucleotide sequence
  source 1..119: mol_type = other RNA
gttctgtcttttggtcaggacaaccgtctagctataagtgctgcagggtgtgagaaactcctattgctggacgatgtctcttacgaggcattagcacacttagtcaacaaagagagaat

SEQ ID NO: 820 - RNA, 119 nt, synthetic construct
  misc_feature 1..119: note = Description of Artificial Sequence: synthetic polynucleotide sequence
  source 1..119: mol_type = other RNA
gttctgtcttttggtcaggacaaccgtctagctataagtgctgcagggtgtgagaaactcctattgctggacgatgtctcttacgaggcattagcacgcagggataagcagcctagctc

SEQ ID NO: 821 - RNA, 119 nt, synthetic construct
  misc_feature 1..119: note = Description of Artificial Sequence: synthetic polynucleotide sequence
  source 1..119: mol_type = other RNA
gttctgtcttttggtcaggacaaccgtctagctataagtgctgcagggtgtgagaaactcctattgctggacgatgtctcttacgaggcattagcacgtatgggttacttattctctct

SEQ ID NO: 822 - RNA, 100 nt, synthetic construct
  misc_feature 1..100: note = Description of Artificial Sequence: synthetic polynucleotide sequence
  source 1..100: mol_type = other RNA
caagaatgagtggacttctggttttagagctagaaatagcaagttaaaataaggctagtccgttatcaacttgaaaaagtggcaccgagtcggtgctttt

SEQ ID NO: 823 - RNA, 100 nt, synthetic construct
  misc_feature 1..100: note = Description of Artificial Sequence: synthetic polynucleotide sequence
  source 1..100: mol_type = other RNA
caatctgactgcaaacctgcgttttagagctagaaatagcaagttaaaataaggctagtccgttatcaacttgaaaaagtggcaccgagtcggtgctttt

SEQ ID NO: 824 - RNA, 100 nt, synthetic construct
  misc_feature 1..100: note = Description of Artificial Sequence: synthetic polynucleotide sequence
  source 1..100: mol_type = other RNA
cacagaagtccactcattctgttttagagctagaaatagcaagttaaaataaggctagtccgttatcaacttgaaaaagtggcaccgagtcggtgctttt

SEQ ID NO: 825 - RNA, 100 nt, synthetic construct
  misc_feature 1..100: note = Description of Artificial Sequence: synthetic polynucleotide sequence
  source 1..100: mol_type = other RNA
cagacgatgagaagccatccgttttagagctagaaatagcaagttaaaataaggctagtccgttatcaacttgaaaaagtggcaccgagtcggtgctttt

SEQ ID NO: 826 - RNA, 100 nt, synthetic construct
  misc_feature 1..100: note = Description of Artificial Sequence: synthetic polynucleotide sequence
  source 1..100: mol_type = other RNA
cagcaggtttgcagtcagatgttttagagctagaaatagcaagttaaaataaggctagtccgttatcaacttgaaaaagtggcaccgagtcggtgctttt

SEQ ID NO: 827 - RNA, 100 nt, synthetic construct
  misc_feature 1..100: note = Description of Artificial Sequence: synthetic polynucleotide sequence
  source 1..100: mol_type = other RNA
caggatggcttctcatcgtcgttttagagctagaaatagcaagttaaaataaggctagtccgttatcaacttgaaaaagtggcaccgagtcggtgctttt

SEQ ID NO: 828 - RNA, 109 nt, synthetic construct
  misc_feature 1..109: note = Description of Artificial Sequence: synthetic polynucleotide sequence
  source 1..109: mol_type = other RNA
caggtttgcagtcagattggcgttttagtactctgtaatgaaaattacagaatctactaaaacaaggcaaaatgccgtgtttatctcgtcaacttgttggcgagatttt

SEQ ID NO: 829 - RNA, 100 nt, synthetic construct
  misc_feature 1..100: note = Description of Artificial Sequence: synthetic polynucleotide sequence
  source 1..100: mol_type = other RNA
cagtcagattggcagggatagttttagagctagaaatagcaagttaaaataaggctagtccgttatcaacttgaaaaagtggcaccgagtcggtgctttt

SEQ ID NO: 830 - RNA, 100 nt, synthetic construct
  misc_feature 1..100: note = Description of Artificial Sequence: synthetic polynucleotide sequence
  source 1..100: mol_type = other RNA
ccactcattcttggcaggatgttttagagctagaaatagcaagttaaaataaggctagtccgttatcaacttgaaaaagtggcaccgagtcggtgctttt

SEQ ID NO: 831 - RNA, 100 nt, synthetic construct
  misc_feature 1..100: note = Description of Artificial Sequence: synthetic polynucleotide sequence
  source 1..100: mol_type = other RNA
ctaagtcaataatcagaatcgttttagagctagaaatagcaagttaaaataaggctagtccgttatcaacttgaaaaagtggcaccgagtcggtgctttt

SEQ ID NO: 832 - RNA, 119 nt, synthetic construct
  misc_feature 1..119: note = Description of Artificial Sequence: synthetic polynucleotide sequence
  source 1..119: mol_type = other RNA
gttctgtcttttggtcaggacaaccgtctagctataagtgctgcagggtgtgagaaactcctattgctggacgatgtctcttacgaggcattagcacgtcaacaaagagagaataagta

SEQ ID NO: 833 - RNA, 100 nt, synthetic construct
  misc_feature 1..100: note = Description of Artificial Sequence: synthetic polynucleotide sequence
  source 1..100: mol_type = other RNA
cttatccctgccaatctgacgttttagagctagaaatagcaagttaaaataaggctagtccgttatcaacttgaaaaagtggcaccgagtcggtgctttt

SEQ ID NO: 834 - RNA, 119 nt, synthetic construct
  misc_feature 1..119: note = Description of Artificial Sequence: synthetic polynucleotide sequence
  source 1..119: mol_type = other RNA
gttctgtcttttggtcaggacaaccgtctagctataagtgctgcagggtgtgagaaactcctattgctggacgatgtctcttacgaggcattagcactccctgccaatctgactgcaaa

SEQ ID NO: 835 - RNA, 119 nt, synthetic construct
  misc_feature 1..119: note = Description of Artificial Sequence: synthetic polynucleotide sequence
  source 1..119: mol_type = other RNA
gttctgtcttttggtcaggacaaccgtctagctataagtgctgcagggtgtgagaaactcctattgctggacgatgtctcttacgaggcattagcacttctctctttgttgactaagtc

SEQ ID NO: 836 - RNA, 119 nt, synthetic construct
  misc_feature 1..119: note = Description of Artificial Sequence: synthetic polynucleotide sequence
  source 1..119: mol_type = other RNA
gttctgtcttttggtcaggacaaccgtctagctataagtgctgcagggtgtgagaaactcctattgctggacgatgtctcttacgaggcattagcactcctgagctaggctgcttatcc

SEQ ID NO: 837 - RNA, 100 nt, synthetic construct
  misc_feature 1..100: note = Description of Artificial Sequence: synthetic polynucleotide sequence
  source 1..100: mol_type = other RNA
cttctgtgatggctgctcccgttttagagctagaaatagcaagttaaaataaggctagtccgttatcaacttgaaaaagtggcaccgagtcggtgctttt

SEQ ID NO: 838 - RNA, 119 nt, synthetic construct
  misc_feature 1..119: note = Description of Artificial Sequence: synthetic polynucleotide sequence
  source 1..119: mol_type = other RNA
gttctgtcttttggtcaggacaaccgtctagctataagtgctgcagggtgtgagaaactcctattgctggacgatgtctcttacgaggcattagcactgtgatggctgctcccagcctg

SEQ ID NO: 839 - RNA, 119 nt, synthetic construct
  misc_feature 1..119: note = Description of Artificial Sequence: synthetic polynucleotide sequence
  source 1..119: mol_type = other RNA
gttctgtcttttggtcaggacaaccgtctagctataagtgctgcagggtgtgagaaactcctattgctggacgatgtctcttacgaggcattagcacgcaggatggcttctcatcgtct

SEQ ID NO: 840 - RNA, 119 nt, synthetic construct
  misc_feature 1..119: note = Description of Artificial Sequence: synthetic polynucleotide sequence
  source 1..119: mol_type = other RNA
gttctgtcttttggtcaggacaaccgtctagctataagtgctgcagggtgtgagaaactcctattgctggacgatgtctcttacgaggcattagcactctagagagattagagcatcgg

SEQ ID NO: 841 - RNA, 119 nt, synthetic construct
  misc_feature 1..119: note = Description of Artificial Sequence: synthetic polynucleotide sequence
  source 1..119: mol_type = other RNA
gttctgtcttttggtcaggacaaccgtctagctataagtgctgcagggtgtgagaaactcctattgctggacgatgtctcttacgaggcattagcacgttgactaagtcaataatcaga

SEQ ID NO: 842 - RNA, 119 nt, synthetic construct
  misc_feature 1..119: note = Description of Artificial Sequence: synthetic polynucleotide sequence
  source 1..119: mol_type = other RNA
gttctgtcttttggtcaggacaaccgtctagctataagtgctgcagggtgtgagaaactcctattgctggacgatgtctcttacgaggcattagcactatactcacttctcctgagcta

SEQ ID NO: 843 - RNA, 100 nt, synthetic construct
  misc_feature 1..100: note = Description of Artificial Sequence: synthetic polynucleotide sequence
  source 1..100: mol_type = other RNA
gaagtgagtataaaagccccgttttagagctagaaatagcaagttaaaataaggctagtccgttatcaacttgaaaaagtggcaccgagtcggtgctttt

SEQ ID NO: 844 - RNA, 100 nt, synthetic construct
  misc_feature 1..100: note = Description of Artificial Sequence: synthetic polynucleotide sequence
  source 1..100: mol_type = other RNA
gacaaggttcatatttgtatgttttagagctagaaatagcaagttaaaataaggctagtccgttatcaacttgaaaaagtggcaccgagtcggtgctttt

SEQ ID NO: 845 - RNA, 100 nt, synthetic construct
  misc_feature 1..100: note = Description of Artificial Sequence: synthetic polynucleotide sequence
  source 1..100: mol_type = other RNA
gagtataaaagccccaggctgttttagagctagaaatagcaagttaaaataaggctagtccgttatcaacttgaaaaagtggcaccgagtcggtgctttt

SEQ ID NO: 846 - RNA, 100 nt, synthetic construct
  misc_feature 1..100: note = Description of Artificial Sequence: synthetic polynucleotide sequence
  source 1..100: mol_type = other RNA
gagtggacttctgtgatggcgttttagagctagaaatagcaagttaaaataaggctagtccgttatcaacttgaaaaagtggcaccgagtcggtgctttt

SEQ ID NO: 847 - RNA, 100 nt, synthetic construct
  misc_feature 1..100: note = Description of Artificial Sequence: synthetic polynucleotide sequence
  source 1..100: mol_type = other RNA
gatggctgctcccagcctgggttttagagctagaaatagcaagttaaaataaggctagtccgttatcaacttgaaaaagtggcaccgagtcggtgctttt

SEQ ID NO: 848 - RNA, 100 nt, synthetic construct
  misc_feature 1..100: note = Description of Artificial Sequence: synthetic polynucleotide sequence
  source 1..100: mol_type = other RNA
gcagcctagctcaggagaaggttttagagctagaaatagcaagttaaaataaggctagtccgttatcaacttgaaaaagtggcaccgagtcggtgctttt

SEQ ID NO: 849 - RNA, 100 nt, synthetic construct
  misc_feature 1..100: note = Description of Artificial Sequence: synthetic polynucleotide sequence
  source 1..100: mol_type = other RNA
gctgcttatccctgccaatcgttttagagctagaaatagcaagttaaaataaggctagtccgttatcaacttgaaaaagtggcaccgagtcggtgctttt

SEQ ID NO: 850 - RNA, 100 nt, synthetic construct
  misc_feature 1..100: note = Description of Artificial Sequence: synthetic polynucleotide sequence
  source 1..100: mol_type = other RNA
gggataagcagcctagctcagttttagagctagaaatagcaagttaaaataaggctagtccgttatcaacttgaaaaagtggcaccgagtcggtgctttt

SEQ ID NO: 851 - RNA, 100 nt, synthetic construct
  misc_feature 1..100: note = Description of Artificial Sequence: synthetic polynucleotide sequence
  source 1..100: mol_type = other RNA
ggtttgcagtcagattggcagttttagagctagaaatagcaagttaaaataaggctagtccgttatcaacttgaaaaagtggcaccgagtcggtgctttt

SEQ ID NO: 852 - RNA, 100 nt, synthetic construct
  misc_feature 1..100: note = Description of Artificial Sequence: synthetic polynucleotide sequence
  source 1..100: mol_type = other RNA
gttacttattctctctttgtgttttagagctagaaatagcaagttaaaataaggctagtccgttatcaacttgaaaaagtggcaccgagtcggtgctttt

SEQ ID NO: 853 - RNA, 119 nt, synthetic construct
  misc_feature 1..119: note = Description of Artificial Sequence: synthetic polynucleotide sequence
  source 1..119: mol_type = other RNA
gttctgtcttttggtcaggacaaccgtctagctataagtgctgcagggtgtgagaaactcctattgctggacgatgtctcttacgaggcattagcaccttattctctctttgttgacta

SEQ ID NO: 854 - RNA, 119 nt, synthetic construct
  misc_feature 1..119: note = Description of Artificial Sequence: synthetic polynucleotide sequence
  source 1..119: mol_type = other RNA
gttctgtcttttggtcaggacaaccgtctagctataagtgctgcagggtgtgagaaactcctattgctggacgatgtctcttacgaggcattagcacatatttgtatgggttacttatt

SEQ ID NO: 855 - RNA, 119 nt, synthetic construct
  misc_feature 1..119: note = Description of Artificial Sequence: synthetic polynucleotide sequence
  source 1..119: mol_type = other RNA
gttctgtcttttggtcaggacaaccgtctagctataagtgctgcagggtgtgagaaactcctattgctggacgatgtctcttacgaggcattagcacactaagtcaataatcagaatca

SEQ ID NO: 856 - RNA, 100 nt, synthetic construct
  misc_feature 1..100: note = Description of Artificial Sequence: synthetic polynucleotide sequence
  source 1..100: mol_type = other RNA
gtttgcagtcagattggcaggttttagagctagaaatagcaagttaaaataaggctagtccgttatcaacttgaaaaagtggcaccgagtcggtgctttt

SEQ ID NO: 857 - RNA, 119 nt, synthetic construct
  misc_feature 1..119: note = Description of Artificial Sequence: synthetic polynucleotide sequence
  source 1..119: mol_type = other RNA
gttctgtcttttggtcaggacaaccgtctagctataagtgctgcagggtgtgagaaactcctattgctggacgatgtctcttacgaggcattagcacgcagtcagattggcagggataa

SEQ ID NO: 858 - RNA, 100 nt, synthetic construct
  misc_feature 1..100: note = Description of Artificial Sequence: synthetic polynucleotide sequence
  source 1..100: mol_type = other RNA
tacaaatatgaaccttgtctgttttagagctagaaatagcaagttaaaataaggctagtccgttatcaacttgaaaaagtggcaccgagtcggtgctttt

SEQ ID NO: 859 - RNA, 100 nt, synthetic construct
  misc_feature 1..100: note = Description of Artificial Sequence: synthetic polynucleotide sequence
  source 1..100: mol_type = other RNA
tactcacttctcctgagctagttttagagctagaaatagcaagttaaaataaggctagtccgttatcaacttgaaaaagtggcaccgagtcggtgctttt

SEQ ID NO: 860 - RNA, 100 nt, synthetic construct
  misc_feature 1..100: note = Description of Artificial Sequence: synthetic polynucleotide sequence
  source 1..100: mol_type = other RNA
tataaaagccccaggctggggttttagagctagaaatagcaagttaaaataaggctagtccgttatcaacttgaaaaagtggcaccgagtcggtgctttt

SEQ ID NO: 861 - RNA, 100 nt, synthetic construct
  misc_feature 1..100: note = Description of Artificial Sequence: synthetic polynucleotide sequence
  source 1..100: mol_type = other RNA
tcacttctcctgagctaggcgttttagagctagaaatagcaagttaaaataaggctagtccgttatcaacttgaaaaagtggcaccgagtcggtgctttt

SEQ ID NO: 862 - RNA, 100 nt, synthetic construct
  misc_feature 1..100: note = Description of Artificial Sequence: synthetic polynucleotide sequence
  source 1..100: mol_type = other RNA
tcagattggcagggataagcgttttagagctagaaatagcaagttaaaataaggctagtccgttatcaacttgaaaaagtggcaccgagtcggtgctttt

SEQ ID NO: 863 - RNA, 100 nt, synthetic construct
  misc_feature 1..100: note = Description of Artificial Sequence: synthetic polynucleotide sequence
  source 1..100: mol_type = other RNA
tcaggagaagtgagtataaagttttagagctagaaatagcaagttaaaataaggctagtccgttatcaacttgaaaaagtggcaccgagtcggtgctttt

SEQ ID NO: 864 - RNA, 109 nt, synthetic construct
  misc_feature 1..109: note = Description of Artificial Sequence: synthetic polynucleotide sequence
  source 1..109: mol_type = other RNA
tctgactgcaaacctgctgatgttttagtactctgtaatgaaaattacagaatctactaaaacaaggcaaaatgccgtgtttatctcgtcaacttgttggcgagatttt

SEQ ID NO: 865 - RNA, 100 nt, synthetic construct
  misc_feature 1..100: note = Description of Artificial Sequence: synthetic polynucleotide sequence
  source 1..100: mol_type = other RNA
tgagctaggctgcttatcccgttttagagctagaaatagcaagttaaaataaggctagtccgttatcaacttgaaaaagtggcaccgagtcggtgctttt

SEQ ID NO: 866 - RNA, 100 nt, synthetic construct
  misc_feature 1..100: note = Description of Artificial Sequence: synthetic polynucleotide sequence
  source 1..100: mol_type = other RNA
tgccaatctgactgcaaaccgttttagagctagaaatagcaagttaaaataaggctagtccgttatcaacttgaaaaagtggcaccgagtcggtgctttt

SEQ ID NO: 867 - RNA, 100 nt, synthetic construct
  misc_feature 1..100: note = Description of Artificial Sequence: synthetic polynucleotide sequence
  source 1..100: mol_type = other RNA
tgctctaatctctctagacagttttagagctagaaatagcaagttaaaataaggctagtccgttatcaacttgaaaaagtggcaccgagtcggtgctttt

SEQ ID NO: 868 - RNA, 100 nt, synthetic construct
  misc_feature 1..100: note = Description of Artificial Sequence: synthetic polynucleotide sequence
  source 1..100: mol_type = other RNA
tgtgatggctgctcccagccgttttagagctagaaatagcaagttaaaataaggctagtccgttatcaacttgaaaaagtggcaccgagtcggtgctttt

SEQ ID NO: 869 - RNA, 100 nt, synthetic construct
  misc_feature 1..100: note = Description of Artificial Sequence: synthetic polynucleotide sequence
  source 1..100: mol_type = other RNA
ttggcagggataagcagcctgttttagagctagaaatagcaagttaaaataaggctagtccgttatcaacttgaaaaagtggcaccgagtcggtgctttt

SEQ ID NO: 870 - RNA, 100 nt, synthetic construct
  misc_feature 1..100: note = Description of Artificial Sequence: synthetic polynucleotide sequence
  source 1..100: mol_type = other RNA
ttttatactcacttctcctggttttagagctagaaatagcaagttaaaataaggctagtccgttatcaacttgaaaaagtggcaccgagtcggtgctttt

SEQ ID NO: 871 - DNA, 23 bp, Homo sapiens
  source 1..23: mol_type = other DNA
aacctgctgattctgattattga

SEQ ID NO: 872 - DNA, 23 bp, Homo sapiens
  source 1..23: mol_type = other DNA
aacctgctgattctgattattga

SEQ ID NO: 873 - DNA, 23 bp, Homo sapiens
  source 1..23: mol_type = other DNA
aacctgctgattctgattattga

SEQ ID NO: 874 - DNA, 27 bp, Homo sapiens
  source 1..27: mol_type = other DNA
aagagagaataagtaacccatacaaat

SEQ ID NO: 875 - DNA, 27 bp, Homo sapiens
  source 1..27: mol_type = other DNA
aagagagaataagtaacccatacaaat

SEQ ID NO: 876 - DNA, 27 bp, Homo sapiens
  source 1..27: mol_type = other DNA
aagcagcctagctcaggagaagtgagt

SEQ ID NO: 877 - DNA, 27 bp, Homo sapiens
  source 1..27: mol_type = other DNA
aagcagcctagctcaggagaagtgagt

SEQ ID NO: 878 - DNA, 23 bp, Homo sapiens
  source 1..23: mol_type = other DNA
aagtccactcattcttggcagga

SEQ ID NO: 879 - DNA, 23 bp, Homo sapiens
  source 1..23: mol_type = other DNA
aagtccactcattcttggcagga

SEQ ID NO: 880 - DNA, 23 bp, Homo sapiens
  source 1..23: mol_type = other DNA
aagtccactcattcttggcagga

SEQ ID NO: 881 - DNA, 27 bp, Homo sapiens
  source 1..27: mol_type = other DNA
acgatgagaagccatcctgccaagaat

SEQ ID NO: 882 - DNA, 27 bp, Homo sapiens
  source 1..27: mol_type = other DNA
acgatgagaagccatcctgccaagaat

SEQ ID NO: 883 - DNA, 23 bp, Homo sapiens
  source 1..23: mol_type = other DNA
agacaaggttcatatttgtatgg

SEQ ID NO: 884 - DNA, 23 bp, Homo sapiens
  source 1..23: mol_type = other DNA
agacaaggttcatatttgtatgg

SEQ ID NO: 885 - DNA, 23 bp, Homo sapiens
  source 1..23: mol_type = other DNA
agacaaggttcatatttgtatgg

SEQ ID NO: 886 - DNA, 23 bp, Homo sapiens
  source 1..23: mol_type = other DNA
aggctgggagcagccatcacaga

SEQ ID NO: 887 - DNA, 23 bp, Homo sapiens
  source 1..23: mol_type = other DNA
aggctgggagcagccatcacaga

SEQ ID NO: 888 - DNA, 23 bp, Homo sapiens
  source 1..23: mol_type = other DNA
aggctgggagcagccatcacaga

SEQ ID NO: 889 - DNA, 23 bp, Homo sapiens
  source 1..23: mol_type = other DNA
ataagtaacccatacaaatatga

SEQ ID NO: 890 - DNA, 23 bp, Homo sapiens
  source 1..23: mol_type = other DNA
ataagtaacccatacaaatatga

SEQ ID NO: 891 - DNA, 23 bp, Homo sapiens
  source 1..23: mol_type = other DNA
ataagtaacccatacaaatatga

SEQ ID NO: 892 - DNA, 23 bp, Homo sapiens
  source 1..23: mol_type = other DNA
atactcacttctcctgagctagg

SEQ ID NO: 893 - DNA, 23 bp, Homo sapiens
  source 1..23: mol_type = other DNA
atactcacttctcctgagctagg

SEQ ID NO: 894 - DNA, 23 bp, Homo sapiens
  source 1..23: mol_type = other DNA
atactcacttctcctgagctagg

SEQ ID NO: 895 - DNA, 23 bp, Homo sapiens
  source 1..23: mol_type = other DNA
attattgacttagtcaacaaaga

SEQ ID NO: 896 - DNA, 23 bp, Homo sapiens
  source 1..23: mol_type = other DNA
attattgacttagtcaacaaaga

SEQ ID NO: 897 - DNA, 23 bp, Homo sapiens
  source 1..23: mol_type = other DNA
attattgacttagtcaacaaaga

SEQ ID NO: 898 - DNA, 23 bp, Homo sapiens
  source 1..23: mol_type = other DNA
caaatatgaaccttgtctagaga

SEQ ID NO: 899 - DNA, 23 bp, Homo sapiens
  source 1..23: mol_type = other DNA
caaatatgaaccttgtctagaga

SEQ ID NO: 900 - DNA, 23 bp, Homo sapiens
  source 1..23: mol_type = other DNA
caaatatgaaccttgtctagaga

SEQ ID NO: 901 - DNA, 27 bp, Homo sapiens
  source 1..27: mol_type = other DNA
cagaagtccactcattcttggcaggat

SEQ ID NO: 902 - DNA, 27 bp, Homo sapiens
  source 1..27: mol_type = other DNA
cagaagtccactcattcttggcaggat

SEQ ID NO: 903 - DNA, 27 bp, Homo sapiens
  source 1..27: mol_type = other DNA
caggctgggagcagccatcacagaagt

SEQ ID NO: 904 - DNA, 27 bp, Homo sapiens
  source 1..27: mol_type = other DNA
caggctgggagcagccatcacagaagt

SEQ ID NO: 905 - DNA, 23 bp, Homo sapiens
  source 1..23: mol_type = other DNA
ccatcctgccaagaatgagtgga

SEQ ID NO: 906 - DNA, 23 bp, Homo sapiens
  source 1..23: mol_type = other DNA
ccatcctgccaagaatgagtgga

SEQ ID NO: 907 - DNA, 23 bp, Homo sapiens
  source 1..23: mol_type = other DNA
ccatcctgccaagaatgagtgga

SEQ ID NO: 908 - DNA, 27 bp, Homo sapiens
  source 1..27: mol_type = other DNA
cctgctgattctgattattgacttagt

SEQ ID NO: 909 - DNA, 27 bp, Homo sapiens
  source 1..27: mol_type = other DNA
cctgctgattctgattattgacttagt

SEQ ID NO: 910 - DNA, 27 bp, Homo sapiens
  source 1..27: mol_type = other DNA
cgatgctctaatctctctagacaaggt

SEQ ID NO: 911 - DNA, 27 bp, Homo sapiens
  source 1..27: mol_type = other DNA
cgatgctctaatctctctagacaaggt

SEQ ID NO: 912 - DNA, 27 bp, Homo sapiens
  source 1..27: mol_type = other DNA
ctaagtcaataatcagaatcagcaggt

SEQ ID NO: 913 - DNA, 27 bp, Homo sapiens
  source 1..27: mol_type = other DNA
ctaagtcaataatcagaatcagcaggt

SEQ ID NO: 914 - DNA, 27 bp, Homo sapiens
  source 1..27: mol_type = other DNA
ctagacaaggttcatatttgtatgggt

SEQ ID NO: 915 - DNA, 27 bp, Homo sapiens
  source 1..27: mol_type = other DNA
ctagacaaggttcatatttgtatgggt

SEQ ID NO: 916 - DNA, 23 bp, Homo sapiens
  source 1..23: mol_type = other DNA
gaaccttgtctagagagattaga

SEQ ID NO: 917 - DNA, 23 bp, Homo sapiens
  source 1..23: mol_type = other DNA
gaaccttgtctagagagattaga

SEQ ID NO: 918 - DNA, 23 bp, Homo sapiens
  source 1..23: mol_type = other DNA
gaaccttgtctagagagattaga

SEQ ID NO: 919 - DNA, 23 bp, Homo sapiens
  source 1..23: mol_type = other DNA
gaagtccactcattcttggcagg

SEQ ID NO: 920 - DNA, 23 bp, Homo sapiens
  source 1..23: mol_type = other DNA
gaagtccactcattcttggcagg

SEQ ID NO: 921 - DNA, 23 bp, Homo sapiens
  source 1..23: mol_type = other DNA
gaagtccactcattcttggcagg

SEQ ID NO: 922 - DNA, 23 bp, Homo sapiens
  source 1..23: mol_type = other DNA
gaatcagcaggtttgcagtcaga

SEQ ID NO: 923 - DNA, 23 bp, Homo sapiens
  source 1..23: mol_type = other DNA
gaatcagcaggtttgcagtcaga

SEQ ID NO: 924 - DNA, 23 bp, Homo sapiens
  source 1..23: mol_type = other DNA
gaatcagcaggtttgcagtcaga

SEQ ID NO: 925 - DNA, 23 bp, Homo sapiens
  source 1..23: mol_type = other DNA
gaatgagtggacttctgtgatgg

SEQ ID NO: 926 - DNA, 23 bp, Homo sapiens
  source 1..23: mol_type = other DNA
gaatgagtggacttctgtgatgg

SEQ ID NO: 927 - DNA, 23 bp, Homo sapiens
  source 1..23: mol_type = other DNA
gaatgagtggacttctgtgatgg

SEQ ID NO: 928 - DNA, 23 bp, Homo sapiens
  source 1..23: mol_type = other DNA
gactgcaaacctgctgattctga

SEQ ID NO: 929 - DNA, 23 bp, Homo sapiens
  source 1..23: mol_type = other DNA
gactgcaaacctgctgattctga

SEQ ID NO: 930 - DNA, 23 bp, Homo sapiens
  source 1..23: mol_type = other DNA
gactgcaaacctgctgattctga

SEQ ID NO: 931 - DNA, 27 bp, Homo sapiens
  source 1..27: mol_type = other DNA
gacttagtcaacaaagagagaataagt

SEQ ID NO: 932 - DNA, 27 bp, Homo sapiens
  source 1..27: mol_type = other DNA
gacttagtcaacaaagagagaataagt

SEQ ID NO: 933 - DNA, 23 bp, Homo sapiens
  source 1..23: mol_type = other DNA
gataagcagcctagctcaggaga

SEQ ID NO: 934 - DNA, 23 bp, Homo sapiens
  source 1..23: mol_type = other DNA
gataagcagcctagctcaggaga

SEQ ID NO: 935 - DNA, 23 bp, Homo sapiens
  source 1..23: mol_type = other DNA
gataagcagcctagctcaggaga

SEQ ID NO: 936 - DNA, 23 bp, Homo sapiens
  source 1..23: mol_type = other DNA
gatgagaagccatcctgccaaga

SEQ ID NO: 937 - DNA, 23 bp, Homo sapiens
  source 1..23: mol_type = other DNA
gatgagaagccatcctgccaaga

SEQ ID NO: 938 - DNA, 23 bp, Homo sapiens
  source 1..23: mol_type = other DNA
gatgagaagccatcctgccaaga

SEQ ID NO: 939 - DNA, 23 bp, Homo sapiens
  source 1..23: mol_type = other DNA
gccatcctgccaagaatgagtgg

SEQ ID NO: 940 - DNA, 23 bp, Homo sapiens
  source 1..23: mol_type = other DNA
gccatcctgccaagaatgagtgg

SEQ ID NO: 941 - DNA, 23 bp, Homo sapiens
  source 1..23: mol_type = other DNA
gccatcctgccaagaatgagtgg

SEQ ID NO: 942 - DNA, 23 bp, Homo sapiens
  source 1..23: mol_type = other DNA
gcttttatactcacttctcctga

SEQ ID NO: 943 - DNA, 23 bp, Homo sapiens
  source 1..23: mol_type = other DNA
gcttttatactcacttctcctga

SEQ ID NO: 944 - DNA, 23 bp, Homo sapiens
  source 1..23: mol_type = other DNA
gcttttatactcacttctcctga

SEQ ID NO: 945 - DNA, 27 bp, Homo sapiens
  source 1..27: mol_type = other DNA
ggataagcagcctagctcaggagaagt

SEQ ID NO: 946 - DNA, 27 bp, Homo sapiens
  source 1..27: mol_type = other DNA
ggataagcagcctagctcaggagaagt

SEQ ID NO: 947 - DNA, 23 bp, Homo sapiens
  source 1..23: mol_type = other DNA
gtctagagagattagagcatcgg

SEQ ID NO: 948 - DNA, 23 bp, Homo sapiens
  source 1..23: mol_type = other DNA
gtctagagagattagagcatcgg

SEQ ID NO: 949 - DNA, 23 bp, Homo sapiens
  source 1..23: mol_type = other DNA
gtctagagagattagagcatcgg

SEQ ID NO: 950 - DNA, 23 bp, Homo sapiens
  source 1..23: mol_type = other DNA
gtgatggctgctcccagcctggg

SEQ ID NO: 951 - DNA, 23 bp, Homo sapiens
  source 1..23: mol_type = other DNA
gtgatggctgctcccagcctggg

SEQ ID NO: 952 - DNA, 23 bp, Homo sapiens
  source 1..23: mol_type = other DNA
gtgatggctgctcccagcctggg

SEQ ID NO: 953 - DNA, 27 bp, Homo sapiens
  source 1..27: mol_type = other DNA
tacttattctctctttgttgactaagt

SEQ ID NO: 954 - DNA, 27 bp, Homo sapiens
  source 1..27: mol_type = other DNA
tacttattctctctttgttgactaagt

SEQ ID NO: 955 - DNA, 27 bp, Homo sapiens
  source 1..27: mol_type = other DNA
tattctctctttgttgactaagtcaat

SEQ ID NO: 956 - DNA, 27 bp, Homo sapiens
  source 1..27: mol_type = other DNA
tattctctctttgttgactaagtcaat

SEQ ID NO: 957 - DNA, 23 bp, Homo sapiens
  source 1..23: mol_type = other DNA
tattgacttagtcaacaaagaga

SEQ ID NO: 958 - DNA, 23 bp, Homo sapiens
  source 1..23: mol_type = other DNA
tattgacttagtcaacaaagaga

SEQ ID NO: 959 - DNA, 23 bp, Homo sapiens
  source 1..23: mol_type = other DNA
tattgacttagtcaacaaagaga

SEQ ID NO: 960 - DNA, 27 bp, Homo sapiens
  source 1..27: mol_type = other DNA
tattgacttagtcaacaaagagagaat

SEQ ID NO: 961 - DNA, 27 bp, Homo sapiens
  source 1..27: mol_type = other DNA
tattgacttagtcaacaaagagagaat

SEQ ID NO: 962 - DNA, 27 bp, Homo sapiens
  source 1..27: mol_type = other DNA
tcagaatcagcaggtttgcagtcagat

SEQ ID NO: 963 - DNA, 27 bp, Homo sapiens
  source 1..27: mol_type = other DNA
tcagaatcagcaggtttgcagtcagat

SEQ ID NO: 964 - DNA, 23 bp, Homo sapiens
  source 1..23: mol_type = other DNA
tccactcattcttggcaggatgg

SEQ ID NO: 965 - DNA, 23 bp, Homo sapiens
  source 1..23: mol_type = other DNA
tccactcattcttggcaggatgg

SEQ ID NO: 966 - DNA, 23 bp, Homo sapiens
  source 1..23: mol_type = other DNA
tccactcattcttggcaggatgg

SEQ ID NO: 967 - DNA, 27 bp, Homo sapiens
  source 1..27: mol_type = other DNA
tctctctttgttgactaagtcaataat

SEQ ID NO: 968 - DNA, 27 bp, Homo sapiens
  source 1..27: mol_type = other DNA
tctctctttgttgactaagtcaataat

SEQ ID NO: 969 - DNA, 27 bp, Homo sapiens
  source 1..27: mol_type = other DNA
tgagaagccatcctgccaagaatgagt

SEQ ID NO: 970 - DNA, 27 bp, Homo sapiens
  source 1..27: mol_type = other DNA
tgagaagccatcctgccaagaatgagt

SEQ ID NO: 971 - DNA, 27 bp, Homo sapiens
  source 1..27: mol_type = other DNA
tgagctaggctgcttatccctgccaat

SEQ ID NO: 972 - DNA, 27 bp, Homo sapiens
  source 1..27: mol_type = other DNA
tgagctaggctgcttatccctgccaat

SEQ ID NO: 973 - DNA, 23 bp, Homo sapiens
  source 1..23: mol_type = other DNA
tgagtataaaagccccaggctgg

SEQ ID NO: 974 - DNA, 23 bp, Homo sapiens
  source 1..23: mol_type = other DNA
tgagtataaaagccccaggctgg

SEQ ID NO: 975 - DNA, 23 bp, Homo sapiens
  source 1..23: mol_type = other DNA
tgagtataaaagccccaggctgg

SEQ ID NO: 976 - DNA, 23 bp, Homo sapiens
  source 1..23: mol_type = other DNA
tgatggctgctcccagcctgggg

SEQ ID NO: 977 - DNA, 23 bp, Homo sapiens
  source 1..23: mol_type = other DNA
tgatggctgctcccagcctgggg

SEQ ID NO: 978 - DNA, 23 bp, Homo sapiens
  source 1..23: mol_type = other DNA
tgatggctgctcccagcctgggg

SEQ ID NO: 979 - DNA, 27 bp, Homo sapiens
  source 1..27: mol_type = other DNA
tgccaagaatgagtggacttctgtgat

SEQ ID NO: 980 - DNA, 27 bp, Homo sapiens
  source 1..27: mol_type = other DNA
tgccaagaatgagtggacttctgtgat

SEQ ID NO: 981 - DNA, 27 bp, Homo sapiens
  source 1..27: mol_type = other DNA
tgccaatctgactgcaaacctgctgat

SEQ ID NO: 982 - DNA, 27 bp, Homo sapiens
  source 1..27: mol_type = other DNA
tgccaatctgactgcaaacctgctgat

SEQ ID NO: 983 - DNA, 23 bp, Homo sapiens
  source 1..23: mol_type = other DNA
tgttgactaagtcaataatcaga

SEQ ID NO: 984 - DNA, 23 bp, Homo sapiens
  source 1..23: mol_type = other DNA
tgttgactaagtcaataatcaga

SEQ ID NO: 985 - DNA, 23 bp, Homo sapiens
  source 1..23: mol_type = other DNA
tgttgactaagtcaataatcaga

SEQ ID NO: 986 - DNA, 23 bp, Homo sapiens
  source 1..23: mol_type = other DNA
ttgacttagtcaacaaagagaga

SEQ ID NO: 987 - DNA, 23 bp, Homo sapiens
  source 1..23: mol_type = other DNA
ttgacttagtcaacaaagagaga

SEQ ID NO: 988 - DNA, 23 bp, Homo sapiens
  source 1..23: mol_type = other DNA
ttgacttagtcaacaaagagaga

SEQ ID NO: 989 - DNA, 27 bp, Homo sapiens
  source 1..27: mol_type = other DNA
tttgttgactaagtcaataatcagaat

SEQ ID NO: 990 - DNA, 27 bp, Homo sapiens
  source 1..27: mol_type = other DNA
tttgttgactaagtcaataatcagaat

SEQ ID NO: 991 - DNA, 23 bp, Homo sapiens
  source 1..23: mol_type = other DNA
aaaagccccaggctgggagcagc

SEQ ID NO: 992 - DNA, 23 bp, Homo sapiens
  source 1..23: mol_type = other DNA
aaaagccccaggctgggagcagc

SEQ ID NO: 993 - DNA, 23 bp, Homo sapiens
  source 1..23: mol_type = other DNA
aaaagccccaggctgggagcagc

SEQ ID NO: 994 - DNA, 23 bp, Homo sapiens
  source 1..23: mol_type = other DNA
aagtgagtataaaagccccaggc

SEQ ID NO: 995 - DNA, 23 bp, Homo sapiens
  source 1..23: mol_type = other DNA
aagtgagtataaaagccccaggc

SEQ ID NO: 996 - DNA, 23 bp, Homo sapiens
  source 1..23: mol_type = other DNA
aagtgagtataaaagccccaggc

SEQ ID NO: 997 - DNA, 27 bp, Homo sapiens
  source 1..27: mol_type = other DNA
aataatcagaatcagcaggtttgcagt

SEQ ID NO: 998 - DNA, 27 bp, Homo sapiens
  source 1..27: mol_type = other DNA
aataatcagaatcagcaggtttgcagt

SEQ ID NO: 999 - DNA, 23 bp, Homo sapiens
  source 1..23: mol_type = other DNA
aatatgaaccttgtctagagaga

SEQ ID NO: 1000 - DNA, 23 bp, Homo sapiens
  source 1..23: mol_type = other DNA
aatatgaaccttgtctagagaga

SEQ ID NO: 1001 - DNA, 23 bp, Homo sapiens
  source 1..23: mol_type = other DNA
aatatgaaccttgtctagagaga

SEQ ID NO: 1002 - DNA, 23 bp, Homo sapiens
  source 1..23: mol_type = other DNA
aatgagtggacttctgtgatggc

SEQ ID NO: 1003 - DNA, 23 bp, Homo sapiens
  source 1..23: mol_type = other DNA
aatgagtggacttctgtgatggc

SEQ ID NO: 1004 - DNA, 23 bp, Homo sapiens
  source 1..23: mol_type = other DNA
aatgagtggacttctgtgatggc

SEQ ID NO: 1005 - DNA, 27 bp, Homo sapiens
  source 1..27: mol_type = other DNA
acaaatatgaaccttgtctagagagat

SEQ ID NO: 1006 - DNA, 27 bp, Homo sapiens
  source 1..27: mol_type = other DNA
acaaatatgaaccttgtctagagagat

SEQ ID NO: 1007 - DNA, 23 bp, Homo sapiens
  source 1..23: mol_type = other DNA
acagaagtccactcattcttggc

SEQ ID NO: 1008 - DNA, 23 bp, Homo sapiens
  source 1..23: mol_type = other DNA
acagaagtccactcattcttggc

SEQ ID NO: 1009 - DNA, 23 bp, Homo sapiens
  source 1..23: mol_type = other DNA
acagaagtccactcattcttggc

SEQ ID NO: 1010 - DNA, 23 bp, Homo sapiens
  source 1..23: mol_type = other DNA
accttgtctagagagattagagc

SEQ ID NO: 1011 - DNA, 23 bp, Homo sapiens
  source 1..23: mol_type = other DNA
accttgtctagagagattagagc

SEQ ID NO: 1012 - DNA, 23 bp, Homo sapiens
  source 1..23: mol_type = other DNA
accttgtctagagagattagagc

SEQ ID NO: 1013 - DNA, 23 bp, Homo sapiens
  source 1..23: mol_type = other DNA
agaagccatcctgccaagaatga

SEQ ID NO: 1014 - DNA, 23 bp, Homo sapiens
  source 1..23: mol_type = other DNA
agaagccatcctgccaagaatga

SEQ ID NO: 1015 - DNA, 23 bp, Homo sapiens
  source 1..23: mol_type = other DNA
agaagccatcctgccaagaatga

SEQ ID NO: 1016 - DNA, 23 bp, Homo sapiens
  source 1..23: mol_type = other DNA
agcaggtttgcagtcagattggc

SEQ ID NO: 1017 - DNA, 23 bp, Homo sapiens
  source 1..23: mol_type = other DNA
agcaggtttgcagtcagattggc

SEQ ID NO: 1018 - DNA, 23 bp, Homo sapiens
  source 1..23: mol_type = other DNA
agcaggtttgcagtcagattggc

SEQ ID NO: 1019 - DNA, 23 bp, Homo sapiens
  source 1..23: mol_type = other DNA
agggataagcagcctagctcagg

SEQ ID NO: 1020 - DNA, 23 bp, Homo sapiens
  source 1..23: mol_type = other DNA
agggataagcagcctagctcagg

SEQ ID NO: 1021 - DNA, 23 bp, Homo sapiens
  source 1..23: mol_type = other DNA
agggataagcagcctagctcagg

SEQ ID NO: 1022 - DNA, 23 bp, Homo sapiens
  source 1..23: mol_type = other DNA
aggtttgcagtcagattggcagg

SEQ ID NO: 1023 - DNA, 23 bp, Homo sapiens
  source 1..23: mol_type = other DNA
aggtttgcagtcagattggcagg

SEQ ID NO: 1024 - DNA, 23 bp, Homo sapiens
  source 1..23: mol_type = other DNA
aggtttgcagtcagattggcagg

SEQ ID NO: 1025 - DNA, 23 bp, Homo sapiens
  source 1..23: mol_type = other DNA
agtataaaagccccaggctggga

SEQ ID NO: 1026 - DNA, 23 bp, Homo sapiens
  source 1..23: mol_type = other DNA
agtataaaagccccaggctggga

SEQ ID NO: 1027 - DNA, 23 bp, Homo sapiens
  source 1..23: mol_type = other DNA
agtataaaagccccaggctggga

SEQ ID NO: 1028 - DNA, 23 bp, Homo sapiens
  source 1..23: mol_type = other DNA
agtcaataatcagaatcagcagg

SEQ ID NO: 1029 - DNA, 23 bp, Homo sapiens
  source 1..23: mol_type = other DNA
agtcaataatcagaatcagcagg

SEQ ID NO: 1030 - DNA, 23 bp, Homo sapiens
  source 1..23: mol_type = other DNA
agtcaataatcagaatcagcagg

SEQ ID NO: 1031 - DNA, 23 bp, Homo sapiens
  source 1..23: mol_type = other DNA
ataatcagaatcagcaggtttgc

SEQ ID NO: 1032 - DNA, 23 bp, Homo sapiens
  source 1..23: mol_type = other DNA
ataatcagaatcagcaggtttgc

SEQ ID NO: 1033 - DNA, 23 bp, Homo sapiens
  source 1..23: mol_type = other DNA
ataatcagaatcagcaggtttgc

SEQ ID NO: 1034 - DNA, 26 bp, Homo sapiens
  source 1..26: mol_type = other DNA
attattgacttagtcaacaaagagag

SEQ ID NO: 1035 - DNA, 26 bp, Homo sapiens
  source 1..26: mol_type = other DNA
attctctctttgttgactaagtcaat

SEQ ID NO: 1036 - DNA, 26 bp, Homo sapiens
  source 1..26: mol_type = other DNA
attctgattattgacttagtcaacaa

SEQ ID NO: 1037 - DNA, 26 bp, Homo sapiens
  source 1..26: mol_type = other DNA
attcttggcaggatggcttctcatcg

SEQ ID NO: 1038 - DNA, 26 bp, Homo sapiens
  source 1..26: mol_type = other DNA
attgacttagtcaacaaagagagaat

SEQ ID NO: 1039 - DNA, 26 bp, Homo sapiens
  source 1..26: mol_type = other DNA
attggcagggataagcagcctagctc

SEQ ID NO: 1040 - DNA, 26 bp, Homo sapiens
  source 1..26: mol_type = other DNA
atttgtatgggttacttattctctct

SEQ ID NO: 1041 - DNA, 23 bp, Homo sapiens
  source 1..23: mol_type = other DNA
caagaatgagtggacttctgtga

SEQ ID NO: 1042 - DNA, 23 bp, Homo sapiens
  source 1..23: mol_type = other DNA
caagaatgagtggacttctgtga

SEQ ID NO: 1043 - DNA, 23 bp, Homo sapiens
  source 1..23: mol_type = other DNA
caagaatgagtggacttctgtga

SEQ ID NO: 1044 - DNA, 23 bp, Homo sapiens
  source 1..23: mol_type = other DNA
caatctgactgcaaacctgctga

SEQ ID NO: 1045 - DNA, 23 bp, Homo sapiens
  source 1..23: mol_type = other DNA
caatctgactgcaaacctgctga

SEQ ID NO: 1046 - DNA, 23 bp, Homo sapiens
  source 1..23: mol_type = other DNA
caatctgactgcaaacctgctga

SEQ ID NO: 1047 - DNA, 23 bp, Homo sapiens
  source 1..23: mol_type = other DNA
cacagaagtccactcattcttgg

SEQ ID NO: 1048 - DNA, 23 bp, Homo sapiens
  source 1..23: mol_type = other DNA
cacagaagtccactcattcttgg

SEQ ID NO: 1049 - DNA, 23 bp, Homo sapiens
  source 1..23: mol_type = other DNA
cacagaagtccactcattcttgg

SEQ ID NO: 1050 - DNA, 23 bp, Homo sapiens
  source 1..23: mol_type = other DNA
cagacgatgagaagccatcctgc

SEQ ID NO: 1051 - DNA, 23 bp, Homo sapiens
  source 1..23: mol_type = other DNA
cagacgatgagaagccatcctgc

SEQ ID NO: 1052 - DNA, 23 bp, Homo sapiens
  source 1..23: mol_type = other DNA
cagacgatgagaagccatcctgc

SEQ ID NO: 1053 - DNA, 23 bp, Homo sapiens
  source 1..23: mol_type = other DNA
cagcaggtttgcagtcagattgg

SEQ ID NO: 1054 - DNA, 23 bp, Homo sapiens
  source 1..23: mol_type = other DNA
cagcaggtttgcagtcagattgg

SEQ ID NO: 1055 - DNA, 23 bp, Homo sapiens
  source 1..23: mol_type = other DNA
cagcaggtttgcagtcagattgg

SEQ ID NO: 1056 - DNA, 23 bp, Homo sapiens
  source 1..23: mol_type = other DNA
caggatggcttctcatcgtctgc

SEQ ID NO: 1057 - DNA, 23 bp, Homo sapiens
  source 1..23: mol_type = other DNA
caggatggcttctcatcgtctgc

SEQ ID NO: 1058 - DNA, 23 bp, Homo sapiens
  source 1..23: mol_type = other DNA
caggatggcttctcatcgtctgc

SEQ ID NO: 1059 - DNA, 27 bp, Homo sapiens
  source 1..27: mol_type = other DNA
caggtttgcagtcagattggcagggat

SEQ ID NO: 1060 - DNA, 27 bp, Homo sapiens
  source 1..27: mol_type = other DNA
caggtttgcagtcagattggcagggat

SEQ ID NO: 1061 - DNA, 23 bp, Homo sapiens
  source 1..23: mol_type = other DNA
cagtcagattggcagggataagc

SEQ ID NO: 1062 - DNA, 23 bp, Homo sapiens
  source 1..23: mol_type = other DNA
cagtcagattggcagggataagc

SEQ ID NO: 1063 - DNA, 23 bp, Homo sapiens
  source 1..23: mol_type = other DNA
cagtcagattggcagggataagc

SEQ ID NO: 1064 - DNA, 23 bp, Homo sapiens
  source 1..23: mol_type = other DNA
ccactcattcttggcaggatggc

SEQ ID NO: 1065 - DNA, 23 bp, Homo sapiens
  source 1..23: mol_type = other DNA
ccactcattcttggcaggatggc

SEQ ID NO: 1066 - DNA, 23 bp, Homo sapiens
  source 1..23: mol_type = other DNA
ccactcattcttggcaggatggc

SEQ ID NO: 1067 - DNA, 23 bp, Homo sapiens
  source 1..23: mol_type = other DNA
ctaagtcaataatcagaatcagc

SEQ ID NO: 1068 - DNA, 23 bp, Homo sapiens
  source 1..23: mol_type = other DNA
ctaagtcaataatcagaatcagc

SEQ ID NO: 1069 - DNA, 23 bp, Homo sapiens
  source 1..23: mol_type = other DNA
ctaagtcaataatcagaatcagc

SEQ ID NO: 1070 - DNA, 26 bp, Homo sapiens
  source 1..26: mol_type = other DNA
cttagtcaacaaagagagaataagta

SEQ ID NO: 1071 - DNA, 23 bp, Homo sapiens
  source 1..23: mol_type = other DNA
cttatccctgccaatctgactgc

SEQ ID NO: 1072 - DNA, 23 bp, Homo sapiens
  source 1..23: mol_type = other DNA
cttatccctgccaatctgactgc

SEQ ID NO: 1073 - DNA, 23 bp, Homo sapiens
  source 1..23: mol_type = other DNA
cttatccctgccaatctgactgc

SEQ ID NO: 1074 - DNA, 26 bp, Homo sapiens
  source 1..26: mol_type = other DNA
cttatccctgccaatctgactgcaaa

SEQ ID NO: 1075 - DNA, 26 bp, Homo sapiens
  source 1..26: mol_type = other DNA
cttattctctctttgttgactaagtc

SEQ ID NO: 1076 - DNA, 26 bp, Homo sapiens
  source 1..26: mol_type = other DNA
cttctcctgagctaggctgcttatcc

SEQ ID NO: 1077 - DNA, 23 bp, Homo sapiens
  source 1..23: mol_type = other DNA
cttctgtgatggctgctcccagc

SEQ ID NO: 1078 - DNA, 23 bp, Homo sapiens
  source 1..23: mol_type = other DNA
cttctgtgatggctgctcccagc

SEQ ID NO: 1079 - DNA, 23 bp, Homo sapiens
  source 1..23: mol_type = other DNA
cttctgtgatggctgctcccagc

SEQ ID NO: 1080 - DNA, 26 bp, Homo sapiens
  source 1..26: mol_type = other DNA
cttctgtgatggctgctcccagcctg

SEQ ID NO: 1081 - DNA, 26 bp, Homo sapiens
  source 1..26: mol_type = other DNA
cttggcaggatggcttctcatcgtct

SEQ ID NO: 1082 - DNA, 26 bp, Homo sapiens
  source 1..26: mol_type = other DNA
cttgtctagagagattagagcatcgg

SEQ ID NO: 1083 - DNA, 26 bp, Homo sapiens
  source 1..26: mol_type = other DNA
ctttgttgactaagtcaataatcaga

SEQ ID NO: 1084 - DNA, 26 bp, Homo sapiens
  source 1..26: mol_type = other DNA
cttttatactcacttctcctgagcta

SEQ ID NO: 1085 - DNA, 23 bp, Homo sapiens
  source 1..23: mol_type = other DNA
gaagtgagtataaaagccccagg

SEQ ID NO: 1086 - DNA, 23 bp, Homo sapiens
  source 1..23: mol_type = other DNA
gaagtgagtataaaagccccagg

SEQ ID NO: 1087 - DNA, 23 bp, Homo sapiens
  source 1..23: mol_type = other DNA
gaagtgagtataaaagccccagg

SEQ ID NO: 1088 - DNA, 23 bp, Homo sapiens
  source 1..23: mol_type = other DNA
gacaaggttcatatttgtatggg

SEQ ID NO: 1089 - DNA, 23 bp, Homo sapiens
  source 1..23: mol_type = other DNA
gacaaggttcatatttgtatggg

SEQ ID NO: 1090 - DNA, 23 bp, Homo sapiens
  source 1..23: mol_type = other DNA
gacaaggttcatatttgtatggg

SEQ ID NO: 1091 - DNA, 23 bp, Homo sapiens
  source 1..23: mol_type = other DNA
gagtataaaagccccaggctggg

SEQ ID NO: 1092 - DNA, 23 bp, Homo sapiens
  source 1..23: mol_type = other DNA
gagtataaaagccccaggctggg

SEQ ID NO: 1093 - DNA, 23 bp, Homo sapiens
  source 1..23: mol_type = other DNA
gagtataaaagccccaggctggg

SEQ ID NO: 1094 - DNA, 23 bp, Homo sapiens
  source 1..23: mol_type = other DNA
gagtggacttctgtgatggctgc

SEQ ID NO: 1095 - DNA, 23 bp, Homo sapiens
  source 1..23: mol_type = other DNA
gagtggacttctgtgatggctgc

SEQ ID NO: 1096 - DNA, 23 bp, Homo sapiens
  source 1..23: mol_type = other DNA
gagtggacttctgtgatggctgc

SEQ ID NO: 1097 - DNA, 23 bp, Homo sapiens
  source 1..23: mol_type = other DNA
gatggctgctcccagcctggggc

SEQ ID NO: 1098 - DNA, 23 bp, Homo sapiens
  source 1..23: mol_type = other DNA
gatggctgctcccagcctggggc

SEQ ID NO: 1099 - DNA, 23 bp, Homo sapiens
  source 1..23: mol_type = other DNA
gatggctgctcccagcctggggc

SEQ ID NO: 1100 - DNA, 23 bp, Homo sapiens
  source 1..23: mol_type = other DNA
gcagcctagctcaggagaagtga

SEQ ID NO: 1101 - DNA, 23 bp, Homo sapiens
  source 1..23: mol_type = other DNA
gcagcctagctcaggagaagtga

SEQ ID NO: 1102 - DNA, 23 bp, Homo sapiens
  source 1..23: mol_type = other DNA
gcagcctagctcaggagaagtga

SEQ ID NO: 1103 - DNA, 23 bp, Homo sapiens
  source 1..23: mol_type = other DNA
gctgcttatccctgccaatctga

SEQ ID NO: 1104 - DNA, 23 bp, Homo sapiens
  source 1..23: mol_type = other DNA
gctgcttatccctgccaatctga

SEQ ID NO: 1105 - DNA, 23 bp, Homo sapiens
  source 1..23: mol_type = other DNA
gctgcttatccctgccaatctga

SEQ ID NO: 1106 - DNA, 23 bp, Homo sapiens
  source 1..23: mol_type = other DNA
gggataagcagcctagctcagga

SEQ ID NO: 1107 - DNA, 23 bp, Homo sapiens
  source 1..23: mol_type = other DNA
gggataagcagcctagctcagga

SEQ ID NO: 1108 - DNA, 23 bp, Homo sapiens
  source 1..23: mol_type = other DNA
gggataagcagcctagctcagga

SEQ ID NO: 1109 - DNA, 23 bp, Homo sapiens
  source 1..23: mol_type = other DNA
ggtttgcagtcagattggcaggg

SEQ ID NO: 1110 - DNA, 23 bp, Homo sapiens
  source 1..23: mol_type = other DNA
ggtttgcagtcagattggcaggg

SEQ ID NO: 1111 - DNA, 23 bp, Homo sapiens
  source 1..23: mol_type = other DNA
ggtttgcagtcagattggcaggg

SEQ ID NO: 1112 - DNA, 23 bp, Homo sapiens
  source 1..23: mol_type = other DNA
gttacttattctctctttgttga

SEQ ID NO: 1113 - DNA, 23 bp, Homo sapiens
  source 1..23: mol_type = other DNA
gttacttattctctctttgttga

SEQ ID NO: 1114 - DNA, 23 bp, Homo sapiens
  source 1..23: mol_type = other DNA
gttacttattctctctttgttga

SEQ ID NO: 1115 - DNA, 26 bp, Homo sapiens
  source 1..26: mol_type = other DNA
gttacttattctctctttgttgacta

SEQ ID NO: 1116 - DNA, 26 bp, Homo sapiens
  source 1..26: mol_type = other DNA
gttcatatttgtatgggttacttatt

SEQ ID NO: 1117 - DNA, 26 bp, Homo sapiens
  source 1..26: mol_type = other DNA
gttgactaagtcaataatcagaatca

SEQ ID NO: 1118 - DNA, 23 bp, Homo sapiens
  source 1..23: mol_type = other DNA
gtttgcagtcagattggcaggga

SEQ ID NO: 1119 - DNA, 23 bp, Homo sapiens
  source 1..23: mol_type = other DNA
gtttgcagtcagattggcaggga

SEQ ID NO: 1120 - DNA, 23 bp, Homo sapiens
  source 1..23: mol_type = other DNA
gtttgcagtcagattggcaggga

SEQ ID NO: 1121 - DNA, 26 bp, Homo sapiens
  source 1..26: mol_type = other DNA
gtttgcagtcagattggcagggataa

SEQ ID NO: 1122 - DNA, 23 bp, Homo sapiens
  source 1..23: mol_type = other DNA
tacaaatatgaaccttgtctaga

SEQ ID NO: 1123 - DNA, 23 bp, Homo sapiens
  source 1..23: mol_type = other DNA
tacaaatatgaaccttgtctaga

SEQ ID NO: 1124 - DNA, 23 bp, Homo sapiens
  source 1..23: mol_type = other DNA
tacaaatatgaaccttgtctaga

SEQ ID NO: 1125 - DNA, 23 bp, Homo sapiens
  source 1..23: mol_type = other DNA
tactcacttctcctgagctaggc

SEQ ID NO: 1126 - DNA, 23 bp, Homo sapiens
  source 1..23: mol_type = other DNA
tactcacttctcctgagctaggc

SEQ ID NO: 1127 - DNA, 23 bp, Homo sapiens
  source 1..23: mol_type = other DNA
tactcacttctcctgagctaggc

SEQ ID NO: 1128 - DNA, 23 bp, Homo sapiens
  source 1..23: mol_type = other DNA
tataaaagccccaggctgggagc

SEQ ID NO: 1129 - DNA, 23 bp, Homo sapiens
  source 1..23: mol_type = other DNA
tataaaagccccaggctgggagc

SEQ ID NO: 1130 - DNA, 23 bp, Homo sapiens
  source 1..23: mol_type = other DNA
tataaaagccccaggctgggagc

SEQ ID NO: 1131 - DNA, 23 bp, Homo sapiens
  source 1..23: mol_type = other DNA
tcacttctcctgagctaggctgc

SEQ ID NO: 1132 - DNA, 23 bp, Homo sapiens
  source 1..23: mol_type = other DNA
tcacttctcctgagctaggctgc

SEQ ID NO: 1133 - DNA, 23 bp, Homo sapiens
  source 1..23: mol_type = other DNA
tcacttctcctgagctaggctgc

SEQ ID NO: 1134 - DNA, 23 bp, Homo sapiens
  source 1..23: mol_type = other DNA
tcagattggcagggataagcagc

SEQ ID NO: 1135 - DNA, 23 bp, Homo sapiens
  source 1..23: mol_type = other DNA
tcagattggcagggataagcagc

SEQ ID NO: 1136 - DNA, 23 bp, Homo sapiens
  source 1..23: mol_type = other DNA
tcagattggcagggataagcagc

SEQ ID NO: 1137 - DNA, 23 bp, Homo sapiens
  source 1..23: mol_type = other DNA
tcaggagaagtgagtataaaagc

SEQ ID NO: 1138 - DNA, 23 bp, Homo sapiens
  source 1..23: mol_type = other DNA
tcaggagaagtgagtataaaagc

SEQ ID NO: 1139 - DNA, 23 bp, Homo sapiens
  source 1..23: mol_type = other DNA
tcaggagaagtgagtataaaagc

SEQ ID NO: 1140 - DNA, 27 bp, Homo sapiens
  source 1..27: mol_type = other DNA
tctgactgcaaacctgctgattctgat

SEQ ID NO: 1141 - DNA, 27 bp, Homo sapiens
  source 1..27: mol_type = other DNA
tctgactgcaaacctgctgattctgat

SEQ ID NO: 1142 - DNA, 23 bp, Homo sapiens
  source 1..23: mol_type = other DNA
tgagctaggctgcttatccctgc

SEQ ID NO: 1143 - DNA, 23 bp, Homo sapiens
  source 1..23: mol_type = other DNA
tgagctaggctgcttatccctgc

SEQ ID NO: 1144 - DNA, 23 bp, Homo sapiens
  source 1..23: mol_type = other DNA
tgagctaggctgcttatccctgc

SEQ ID NO: 1145 - DNA, 23 bp, Homo sapiens
  source 1..23: mol_type = other DNA
tgccaatctgactgcaaacctgc

SEQ ID NO: 1146 - DNA, 23 bp, Homo sapiens
  source 1..23: mol_type = other DNA
tgccaatctgactgcaaacctgc

SEQ ID NO: 1147 - DNA, 23 bp, Homo sapiens
  source 1..23: mol_type = other DNA
tgccaatctgactgcaaacctgc

SEQ ID NO: 1148 - DNA, 23 bp, Homo sapiens
  source 1..23: mol_type = other DNA
tgctctaatctctctagacaagg

SEQ ID NO: 1149 - DNA, 23 bp, Homo sapiens
  source 1..23: mol_type = other DNA
tgctctaatctctctagacaagg

SEQ ID NO: 1150 - DNA, 23 bp, Homo sapiens
  source 1..23: mol_type = other DNA
tgctctaatctctctagacaagg

SEQ ID NO: 1151 - DNA, 23 bp, Homo sapiens
  source 1..23: mol_type = other DNA
tgtgatggctgctcccagcctgg

SEQ ID NO: 1152 - DNA, 23 bp, Homo sapiens
  source 1..23: mol_type = other DNA
tgtgatggctgctcccagcctgg

SEQ ID NO: 1153 - DNA, 23 bp, Homo sapiens
  source 1..23: mol_type = other DNA
tgtgatggctgctcccagcctgg

SEQ ID NO: 1154 - DNA, 23 bp, Homo sapiens
  source 1..23: mol_type = other DNA
ttggcagggataagcagcctagc

SEQ ID NO: 1155 - DNA, 23 bp, Homo sapiens
  source 1..23: mol_type = other DNA
ttggcagggataagcagcctagc

SEQ ID NO: 1156 - DNA, 23 bp, Homo sapiens
  source 1..23: mol_type = other DNA
ttggcagggataagcagcctagc

SEQ ID NO: 1157 - DNA, 23 bp, Homo sapiens
  source 1..23: mol_type = other DNA
ttttatactcacttctcctgagc

SEQ ID NO: 1158 - DNA, 23 bp, Homo sapiens
  source 1..23: mol_type = other DNA
ttttatactcacttctcctgagc

SEQ ID NO: 1159 - DNA, 23 bp, Homo sapiens
  source 1..23: mol_type = other DNA
ttttatactcacttctcctgagc

SEQ ID NO: 1160 - DNA, 218 bp, Homo sapiens
  source 1..218: mol_type = other DNA
ttccgatgctctaatctctctagacaaggttcatatttgtatgggttacttattctctctttgttgactaagtcaataatcagaatcagcaggtttgcagtcagattggcagggataagcagcctagctcaggagaagtgagtataaaagccccaggctgggagcagccatcacagaagtccactcattcttggcaggatggcttctcatcgtctgct

What is claimed:

1. A method for editing a transthyretin (TTR) polynucleotide sequence, the method comprising: contacting the polynucleotide sequence with a guide RNA and a base editor comprising a polynucleotide programmable DNA binding polypeptide and an adenosine or cytidine deaminase, wherein said guide RNA targets said base editor to effect an alteration of a nucleobase of the TTR polynucleotide sequence.

2. The method of claim 1, wherein the editing introduces an alteration that corrects a mutation in a TTR polynucleotide and/or wherein the editing introduces an alteration that reduces or eliminates expression of a TTR polypeptide.

3. The method of claim 1, wherein the alteration is in a splice acceptor, splice donor, intronic sequence, exonic sequence, enhancer, or promoter.

4. A method for editing a transthyretin (TTR) polynucleotide sequence, the method comprising: contacting the polynucleotide sequence with a guide RNA and a fusion protein comprising a polynucleotide programmable DNA binding domain and an adenosine deaminase domain, wherein the adenosine deaminase domain comprises an arginine (R) or a threonine (T) at amino acid position 147 of the following amino acid sequence, and the adenosine deaminase domain has at least about 85% sequence identity to the following amino acid sequence: MSEVEFSHEYWMRHALTLAKRARDEREVPVGAVLVLNNRVIGEGWNRAIGLHDPTAHAEIMALR QGGLVMQNYRLIDATLYVTFEPCVMCAGAMIHSRIGRVVFGVRNAKTGAAGSLMDVLHYPGMNH RVEITEGILADECAALLCYFFRMPRQVFNAQKKAQSSTD (SEQ ID NO: 4; TadA*7.10), or wherein the cytidine deaminase domain comprises an amino acid sequence with at least about 85% sequence identity to the amino acid sequence: MSSETGPVAVDPTLRRRIEPHEFEVFFDPRELRKETCLLYEINWGGRHSIWRHTSQNTNKHVEV NFIEKFTTERYFCPNTRCSITWFLSWSPCGECSRAITEFLSRYPHVTLFIYIARLYHHADPRNR QGLRDLISSGVTIQIMTEQESGYCWRNFVNYSPSNEAHWPRYPHLWVRLYVLELYCIILGLPPC LNILRRKQPQLTFFTIALQSCHYQRLPPHILWATGLK (SEQ ID NO: 15; BE4 cytidine deaminase domain), wherein said guide RNA targets said fusion protein to effect an alteration of a nucleobase of the TTR polynucleotide sequence.

5. The method of claim 4, wherein the alteration is in a region of the TTR promoter corresponding to nucleotide positions +1 to −225 of the TTR promoter, wherein position +1 corresponds to A of the start codon (ATG) of the TTR polynucleotide sequence;
wherein the alteration is in a region of the TTR promoter corresponding to nucleotide positions +1 to −198 of the TTR promoter, wherein position +1 corresponds to A of the start codon (ATG) of the TTR polynucleotide sequence; wherein the alteration is in a region of the TTR promoter corresponding to nucleotide positions +1 to −177 of the TTR promoter, wherein position +1 corresponds to A of the start codon (ATG) of the TTR polynucleotide sequence; or
wherein the alteration is in a region of the TTR promoter corresponding to nucleotide positions −106 to −176 of the TTR promoter, wherein position +1 corresponds to A of the start codon (ATG) of the TTR polynucleotide sequence.

6. The method of claim 1, wherein the TTR polynucleotide sequence encodes a mature TTR polypeptide comprising a pathogenic alteration selected from the group consisting of T60A, V30M, V30A, V30G, V30L, V122I, and V122A.

7. The method of claim 1, wherein the altered nucleobase is
4A of the nucleotide sequence TATAGGAAAACCAGTGAGTC (SEQ ID NO: 425; TSBT×2602/gRNA1598 target site sequence corresponding to sgRNA_361);
6A of the nucleotide sequence TACTCACCTCTGCATGCTCA (SEQ ID NO: 426; TSBT×2603/gRNA1599 target site sequence corresponding to sgRNA_362);
5A of the nucleotide sequence ACTCACCTCTGCATGCTCAT (SEQ ID NO: 427; TSBT×2604/gRNA1606 target site sequence corresponding to sgRNA_363);
7A of the nucleotide sequence ATACTCACCTCTGCATGCTCA (SEQ ID NO: 429; TSBT×2606 target site sequence corresponding to sgRNA_365);
6A of the nucleotide sequence TTGGCAGGATGGCTTCTCATCG (SEQ ID NO: 431; TSBT×2608/gRNA-#19 target site corresponding to sgRNA_367);
9A of the sequence TTGGCAGGATGGCTTCTCATCG (SEQ ID NO: 431; TSBT×2608/gRNA-#19 target site corresponding to sgRNA_367);
5A of the sequence GGCTATCGTCACCAATCCCA (SEQ ID NO: 439; corresponding to sgRNA_375); or
4A of the sequence GCTATCGTCACCAATCCCAA (SEQ ID NO: 440; corresponding to sgRNA_376);
7C of the nucleotide sequence TACTCACCTCTGCATGCTCA (SEQ ID NO: 426; TSBT×2603/gRNA1599 target site corresponding to sgRNA_362);
6C of the nucleotide sequence ACTCACCTCTGCATGCTCAT (SEQ ID NO: 427; TSBT×2604/gRNA1606 target site corresponding to sgRNA_363);
7C of the nucleotide sequence TACCACCTATGAGAGAAGAC (SEQ ID NO: 428; TSBT×2605 target site corresponding to sgRNA_364);
8C of the nucleotide sequence ATACTCACCTCTGCATGCTCA (SEQ ID NO: 429; TSBT×2606 target site corresponding to sgRNA 365); or
11C of the nucleotide sequence ACTGGTTTTCCTATAAGGTGT (SEQ ID NO: 430; TSBT×2607 target site corresponding to sgRNA_366).

8. The method of claim 4, wherein the TadA deaminase is TadA*7.10, TadA*8.1, TadA*8.2, TadA*8.8, TadA*8.9, TadA*8.10, TadA*8.11, TadA*8.12, TadA*8.13, TadA*8.15, TadA*8.16, TadA*8.19, TadA*8.20, TadA*8.21, or TadA*8.24.

9. The method of claim 1, wherein the guide RNA(s) comprises a nucleotide sequence selected from one or more of those sequences listed in Table 1, Table 2A, or Table 2B; or any of the aforementioned sequences wherein 1, 2, 3, 4, or 5 nucleotides is deleted from the 5′ and/or 3′ terminus of the nucleotide sequence.

10. The method of claim 1, wherein the guide RNA(s) comprises a nucleotide sequence, selected from the group consisting of:
(SEQ ID NO: 408; sgRNA_361/gRNA1598)
5′-UAUAGGAAAACCAGUGAGUC-3′;
(SEQ ID NO: 409; sgRNA_362/gRNA1599)
5′-UACUCACCUCUGCAUGCUCA-3′;
(SEQ ID NO: 410; sgRNA_363/gRNA1606)
5′-ACUCACCUCUGCAUGCUCAU-3′;
(SEQ ID NO: 412; sgRNA_365)
5′-AUACUCACCUCUGCAUGCUCA-3′;
(SEQ ID NO: 414; sgRNA_367/gRNA-#19)
5′-UUGGCAGGAUGGCUUCUCAUCG-3′;
(SEQ ID NO: 422; sgRNA_375)
5′-GGCUAUCGUCACCAAUCCCA-3′;
(SEQ ID NO: 423; sgRNA_376)
5′-GCUAUCGUCACCAAUCCCAA-3′;
(SEQ ID NO: 561; gRNA1604)
5′-ACACCUUAUAGGAAAACCAG-3′;
(SEQ ID NO: 554; gRNA1597)
5′-CUCUCAUAGGUGGUAUUCAC-3′;
(SEQ ID NO: 557; gRNA1600)
5′-GCAACUUACCCAGAGGCAAA-3′;
(SEQ ID NO: 551; gRNA1594)
5′-CAACUUACCCAGAGGCAAAU-3′;
(SEQ ID NO: 558; gRNA1601)
5′-UCUGUAUACUCACCUCUGCA-3′;
(SEQ ID NO: 462; gRNA1756)
5′-CAAAUAUGAACCUUGUCUAG-3′;
(SEQ ID NO: 470; gRNA1764)
5′-GAACCUUGUCUAGAGAGAUU-3′;
(SEQ ID NO: 492; gRNA1786)
5′-UGAGUAUAAAAGCCCCAGGC-3′;
and
(SEQ ID NO: 478; gRNA1772)
5′-GCCAUCCUGCCAAGAAUGAG-3′;
(SEQ ID NO: 409; sgRNA_362/gRNA1599)
5′-UACUCACCUCUGCAUGCUCA-3′,
(SEQ ID NO: 410; sgRNA_363/gRNA1606)
5′-ACUCACCUCUGCAUGCUCAU-3′,
(SEQ ID NO: 411; sgRNA_364)
5′-UACCACCUAUGAGAGAAGAC-3′,
(SEQ ID NO: 412; sgRNA_365)
5′-AUACUCACCUCUGCAUGCUCA-3′,
(SEQ ID NO: 413; sgRNA_366)
5′-ACUGGUUUUCCUAUAAGGUGU-3′,
(SEQ ID NO: 551; gRNA1594)
5′-CAACUUACCCAGAGGCAAAU-3′,
and
(SEQ ID NO: 496; gRNA1790)
5′-UGUUGACUAAGUCAAUAAUC-3′;
or any of the aforementioned sequences wherein 1, 2, 3, 4, or 5 nucleotides is deleted from the 5′ and/or 3′ terminus of the nucleotide sequence.

11. A method for editing a transthyretin (TTR) polynucleotide sequence, the method comprising: contacting the polynucleotide sequence with a guide RNA and a Cas12b endonuclease, wherein said guide RNA targets said endonuclease to effect a double-stranded break of the TTR polynucleotide sequence.

12. The method of claim 11, wherein the guide RNA comprises a nucleotide sequence, selected from the group consisting of:
(SEQ ID NO: 415; sgRNA_368)
5′-UCCUAUAAGGUGUGAAAGUCUG-3′,
(SEQ ID NO: 416; sgRNA_369)
5′-UGAGCCCAUGCAGCUCUCCAGA-3′,
(SEQ ID NO: 417; sgRNA_370)
5′-CUCCUCAGUUGUGAGCCCAUGC-3′,
(SEQ ID NO: 418; sgRNA_371)
5′-GUAGAAGGGAUAUACAAAGUGG-3′,
(SEQ ID NO: 419; sgRNA_372)
5′-CCACUUUGUAUAUCCCUUCUAC-3′,
(SEQ ID NO: 420; sgRNA_373)
5′-GGUGUCUAUUUCCACUUUGUAU-3′,
and
(SEQ ID NO: 421; sgRNA_374)
5′-CAUGAGCAUGCAGAGGUGAGUA-3′;
or any of the aforementioned sequences wherein 1, 2, 3, 4, or 5 nucleotides is deleted from the 5′ and/or 3′ terminus of the nucleotide sequence.

13. A method for treating amyloidosis in a subject, the method comprising administering to the subject a guide RNA and a polynucleotide encoding a base editor comprising a polynucleotide programmable DNA binding polypeptide and an adenosine or cytidine deaminase, wherein said guide RNA targets said base editor to effect an alteration of a nucleobase of the TTR polynucleotide sequence, wherein the adenosine deaminase domain comprises an arginine (R) or a threonine (T) at amino acid position 147 of the following amino acid sequence, and the adenosine deaminase domain has at least about 85% sequence identity to the following amino acid sequence
(SEQ ID NO: 4; TadA*7.10)
MSEVEFSHEYWMRHALTLAKRARDEREVPVGAVLVLNNRVIGEGWNR
AIGLHDPTAHAEIMALRQGGLVMQNYRLIDATLYVTFEPCVMCAGAM
IHSRIGRVVFGVRNAKTGAAGSLMDVLHYPGMNHRVEITEGILADEC
AALLCYFFRMPRQVFNAQKKAQSSTD,
wherein said guide RNA targets said fusion protein to effect an alteration of a nucleobase of the TTR polynucleotide sequence or
wherein the cytidine deaminase domain comprises an amino acid sequence with at least about 85% sequence identity to the amino acid sequence: MSSETGPVAVDPTLRRRIEPHEFEVFFDPRELRKETCLLYEINWGGRHSIWRHTSQNTNKHVEV NFIEKFTTERYFCPNTRCSITWFLSWSPCGECSRAITEFLSRYPHVTLFIYIARLYHHADPRNR QGLRDLISSGVTIQIMTEQESGYCWRNFVNYSPSNEAHWPRYPHLWVRLYVLELYCIILGLPPC LNILRRKQPQLTFFTIALQSCHYQRLPPHILWATGLK (SEQ ID NO: 15), wherein said guide RNA targets said fusion protein to effect an alteration of a nucleobase of the TTR polynucleotide sequence.

14. The method of claim 13, wherein the altered nucleobase is
4A of the nucleotide sequence TATAGGAAAACCAGTGAGTC (SEQ ID NO: 425; TSBT×2602/gRNA1598 target site sequence corresponding to sgRNA_361);
6A of the nucleotide sequence TACTCACCTCTGCATGCTCA (SEQ ID NO: 426; TSBT×2603/gRNA1599 target site sequence corresponding to sgRNA_362);
5A of the nucleotide sequence ACTCACCTCTGCATGCTCAT (SEQ ID NO: 427; TSBT×2604/gRNA1606 target site sequence corresponding to sgRNA_363);
7A of the nucleotide sequence ATACTCACCTCTGCATGCTCA (SEQ ID NO: 429; TSBT×2606 target site sequence corresponding to sgRNA_365);
6A of the nucleotide sequence TTGGCAGGATGGCTTCTCATCG (SEQ ID NO: 431; TSBT×2608/gRNA-#19 target site corresponding to sgRNA_367);
9A of the sequence TTGGCAGGATGGCTTCTCATCG (SEQ ID NO: 431; TSBT×2608/gRNA-#19 target site corresponding to sgRNA_367);
5A of the sequence GGCTATCGTCACCAATCCCA (SEQ ID NO: 439; corresponding to sgRNA_375); or
4A of the sequence GCTATCGTCACCAATCCCAA (SEQ ID NO: 440; corresponding to sgRNA_376);
7C of the nucleotide sequence TACTCACCTCTGCATGCTCA (SEQ ID NO: 426; TSBT×2603/gRNA1599 target site corresponding to sgRNA_362);
6C of the nucleotide sequence ACTCACCTCTGCATGCTCAT (SEQ ID NO: 427; TSBT×2604/gRNA1606 target site corresponding to sgRNA_363);
7C of the nucleotide sequence TACCACCTATGAGAGAAGAC (SEQ ID NO: 428; TSBT×2605 target site corresponding to sgRNA_364);
8C of the nucleotide sequence ATACTCACCTCTGCATGCTCA (SEQ ID NO: 429; TSBT×2606 target site corresponding to sgRNA 365); or
11C of the nucleotide sequence ACTGGTTTTCCTATAAGGTGT (SEQ ID NO: 430; TSBT×2607 target site corresponding to sgRNA_366).

15. The method of claim 13, wherein the adenosine deaminase is a TadA deaminase selected from the group consisting of TadA7*10, TadA*8.1, TadA*8.2, TadA*8.8, TadA*8.9, TadA*8.10, TadA*8.11, TadA*8.12, TadA*8.13, TadA*8.15, TadA*8.16, TadA*8.19, TadA*8.20, TadA*8.21, or TadA*8.24.

16. The method of claim 13, wherein the guide RNA(s) comprises a nucleotide sequence selected from one or more of those sequences listed in Table 1, Table 2A, or Table 2B; or any of the aforementioned sequences wherein 1, 2, 3, 4, or 5 nucleotides is deleted from the 5′ and/or 3′ terminus of the nucleotide sequence.

17. The method of claim 13, wherein the guide RNA(s) comprises a nucleotide sequence, selected from the group consisting of:
(SEQ ID NO: 408; sgRNA_361/gRNA1598)
5′-UAUAGGAAAACCAGUGAGUC-3′;
(SEQ ID NO: 409; sgRNA_362/gRNA1599)
5′-UACUCACCUCUGCAUGCUCA-3′;
(SEQ ID NO: 410; sgRNA_363/gRNA1606)
5′-ACUCACCUCUGCAUGCUCAU-3′;
(SEQ ID NO: 412; sgRNA_365)
5′-AUACUCACCUCUGCAUGCUCA-3′;
(SEQ ID NO: 414; sgRNA_367/gRNA-#19)
5′-UUGGCAGGAUGGCUUCUCAUCG-3′;
(SEQ ID NO: 422; sgRNA_375)
5′-GGCUAUCGUCACCAAUCCCA-3′;
(SEQ ID NO: 423; sgRNA_376)
5′-GCUAUCGUCACCAAUCCCAA-3′;
(SEQ ID NO: 561; gRNA1604)
5′-ACACCUUAUAGGAAAACCAG-3′;
(SEQ ID NO: 554; gRNA1597)
5′-CUCUCAUAGGUGGUAUUCAC-3′;
(SEQ ID NO: 557; gRNA1600)
5′-GCAACUUACCCAGAGGCAAA-3′;
(SEQ ID NO: 551; gRNA1594)
5′-CAACUUACCCAGAGGCAAAU-3′;
(SEQ ID NO: 558; gRNA1601)
5′-UCUGUAUACUCACCUCUGCA-3′;
(SEQ ID NO: 462; gRNA1756)
5′-CAAAUAUGAACCUUGUCUAG-3′;
(SEQ ID NO: 470; gRNA1764)
5′-GAACCUUGUCUAGAGAGAUU-3′;
(SEQ ID NO: 492; gRNA1786)
5′-UGAGUAUAAAAGCCCCAGGC-3′;
and
(SEQ ID NO: 478; gRNA1772)
5′-GCCAUCCUGCCAAGAAUGAG-3′;
(SEQ ID NO: 409; sgRNA_362/gRNA1599)
5′-UACUCACCUCUGCAUGCUCA-3′,
(SEQ ID NO: 410; sgRNA_363/gRNA1606)
5′-ACUCACCUCUGCAUGCUCAU-3′,
(SEQ ID NO: 411; sgRNA_364)
5′-UACCACCUAUGAGAGAAGAC-3′,
(SEQ ID NO: 412; sgRNA_365)
5′-AUACUCACCUCUGCAUGCUCA-3′,
(SEQ ID NO: 413; sgRNA_366)
5′-ACUGGUUUUCCUAUAAGGUGU-3′,
(SEQ ID NO: 551; gRNA1594)
5′-CAACUUACCCAGAGGCAAAU-3′,
and
(SEQ ID NO: 496; gRNA1790)
5′-UGUUGACUAAGUCAAUAAUC-3′;
or any of the aforementioned sequences wherein 1, 2, 3, 4, or 5 nucleotides is deleted from the 5′ and/or 3′ terminus of the nucleotide sequence.

18. A method for editing a transthyretin (TTR) polynucleotide sequence in a subject, the method comprising administering to a subject a guide RNA and a Cas12b endonuclease, wherein said guide RNA targets said endonuclease to effect a double-stranded break of the TTR polynucleotide sequence, wherein the TTR polynucleotide sequence encodes a mature TTR polynucleotide comprising a pathogenic alteration selected from the group consisting of T60A, V30M, V30A, V30G, V30L, V122I, and V122A, wherein the guide RNA(s) comprises a nucleotide sequence selected from one or more of those sequences listed in Table 1, Table 2A, or Table 2B; or any of the aforementioned sequences wherein 1, 2, 3, 4, or 5 nucleotides is deleted from the 5′ and/or 3′ terminus of the nucleotide sequence.

19. The method of claim 18, wherein the guide RNA comprises a nucleotide sequence, selected from the group consisting of:
(SEQ ID NO: 415; sgRNA_368)
5′-UCCUAUAAGGUGUGAAAGUCUG-3′,
(SEQ ID NO: 416; sgRNA_369)
5′-UGAGCCCAUGCAGCUCUCCAGA-3′,
(SEQ ID NO: 417; sgRNA_370)
5′-CUCCUCAGUUGUGAGCCCAUGC-3′,
(SEQ ID NO: 418; sgRNA_371)
5′-GUAGAAGGGAUAUACAAAGUGG-3′,
(SEQ ID NO: 419; sgRNA_372)
5′-CCACUUUGUAUAUCCCUUCUAC-3′,
(SEQ ID NO: 420; sgRNA_373)
5′-GGUGUCUAUUUCCACUUUGUAU-3′,
and
(SEQ ID NO: 421; sgRNA_374)
5′-CAUGAGCAUGCAGAGGUGAGUA-3′;
or any of the aforementioned sequences wherein 1, 2, 3, 4, or 5 nucleotides is deleted from the 5′ and/or 3′ terminus of the nucleotide sequence.

20. A composition comprising one or more polynucleotides encoding a fusion protein and a guide RNA, wherein the guide RNA comprises a nucleic acid sequence that is complementary to a transthyretin (TTR) polynucleotide, and wherein the fusion protein comprises a polynucleotide programmable DNA binding domain and an adenosine or cytidine deaminase domain.

21. The composition of claim 20, wherein the adenosine deaminase domain comprises an arginine (R) or a threonine (T) at amino acid position 147 of the following amino acid sequence, and the adenosine deaminase domain has at least about 85% sequence identity to the following amino acid sequence:
(SEQ ID NO: 4; TadA*7.10)
MSEVEFSHEYWMRHALTLAKRARDEREVPVGAVLVLNNRVIGEGWNRAI
GLHDPTAHAEIMALRQGGLVMQNYRLIDATLYVTFEPCVMCAGAMIHSR
IGRVVFGVRNAKTGAAGSLMDVLHYPGMNHRVEITEGILADECAALLCY
FFRMPRQVENAQKKAQSSTD,
wherein said guide RNA targets said fusion protein to effect an alteration of a nucleobase of a TTR polynucleotide sequence.

22. The composition of claim 20, wherein the fusion protein:
(i) comprises an amino acid sequence that is at least 80%, 85%, 90%, 95%, 96%, 97%, 98%, 99%, or 100% identical to:
ABE8.8
(SEQ ID NO: 442)
MSEVEFSHEYWMRHALTLAKRARDEREVPVGAVLVLNNRVIGEGWNRAIGLHDPTAHAEIMALR
QGGLVMQNYRLIDATLYVTFEPCVMCAGAMIHSRIGRVVFGVRNAKTGAAGSLMDVLHHPGMNH
RVEITEGILADECAALLCRFFRMPRRVENAQKKAQSSTDSGGSSGGSSGSETPGTSESATPESS
GGSSGGSDKKYSIGLAIGTNSVGWAVITDEYKVPSKKFKVLGNTDRHSIKKNLIGALLEDSGET
AEATRLKRTARRRYTRRKNRICYLQEIFSNEMAKVDDSFFHRLEESFLVEEDKKHERHPIFGNI
VDEVAYHEKYPTIYHLRKKLVDSTDKADLRLIYLALAHMIKERGHFLIEGDLNPDNSDVDKLFI
QLVQTYNQLFEENPINASGVDAKAILSARLSKSRRLENLIAQLPGEKKNGLFGNLIALSLGLTP
NFKSNFDLAEDAKLQLSKDTYDDDLDNLLAQIGDQYADLFLAAKNLSDAILLSDILRVNTEITK
APLSASMIKRYDEHHQDLTLLKALVRQQLPEKYKEIFFDQSKNGYAGYIDGGASQEEFYKFIKP
ILEKMDGTEELLVKLNREDLLRKQRTFDNGSIPHQIHLGELHAILRRQEDFYPELKDNREKIEK
ILTFRIPYYVGPLARGNSRFAWMTRKSEETITPWNFEEVVDKGASAQSFIERMTNEDKNLPNEK
VLPKHSLLYEYFTVYNELTKVKYVTEGMRKPAFLSGEQKKAIVDLLFKTNRKVTVKQLKEDYFK
KIECFDSVEISGVEDRFNASLGTYHDLLKIIKDKDELDNEENEDILEDIVLTLTLFEDREMIEE
RLKTYAHLFDDKVMKQLKRRRYTGWGRLSRKLINGIRDKQSGKTILDFLKSDGFANRNFMQLIH
DDSLTFKEDIQKAQVSGQGDSLHEHIANLAGSPAIKKGILQTVKVVDELVKVMGRHKPENIVIE
MARENQTTQKGQKNSRERMKRIEEGIKELGSQILKEHPVENTQLQNEKLYLYYLQNGRDMYVDQ
ELDINRLSDYDVDHIVPQSFLKDDSIDNKVLTRSDKNRGKSDNVPSEEVVKKMKNYWRQLLNAK
LITQRKFDNLTKAERGGLSELDKAGFIKRQLVETRQITKHVAQILDSRMNTKYDENDKLIREVK
VITLKSKLVSDFRKDFQFYKVREINNYHHAHDAYLNAVVGTALIKKYPKLESEFVYGDYKVYDV
RKMIAKSEQEIGKATAKYFFYSNIMNFFKTEITLANGEIRKRPLIETNGETGEIVWDKGRDFAT
VRKVLSMPQVNIVKKTEVQTGGFSKESILPKRNSDKLIARKKDWDPKKYGGFDSPTVAYSVLVV
AKVEKGKSKKLKSVKELLGITIMERSSFEKNPIDFLEAKGYKEVKKDLIIKLPKYSLFELENGR
KRMLASAGELQKGNELALPSKYVNFLYLASHYEKLKGSPEDNEQKQLFVEQHKHYLDEIIEQIS
EFSKRVILADANLDKVLSAYNKHRDKPIREQAENIIHLFTLTNLGAPAAFKYFDTTIDRKRYTS
TKEVLDATLIHQSITGLYETRIDLSQLGGDEGADKRTADGSEFESPKKKRKV;
(ii) comprises an amino acid sequence that is at least 80%, 85%, 90%, 95%, 96%, 97%, 98%, 99%, or 100% identical to:
BE4
(SEQ ID NO: 443)
MSSETGPVAVDPTLRRRIEPHEFEVFFDPRELRKETCLLYEINWGGRHSIWRHTSQNTNKHVEV
NFIEKFTTERYFCPNTRCSITWELSWSPCGECSRAITEFLSRYPHVTLFIYIARLYHHADPRNR
QGLRDLISSGVTIQIMTEQESGYCWRNFVNYSPSNEAHWPRYPHLWVRLYVLELYCIILGLPPC
LNILRRKQPQLTFFTIALQSCHYQRLPPHILWATGLKSGGSSGGSSGSETPGTSESATPESSGG
SSGGSDKKYSIGLAIGTNSVGWAVITDEYKVPSKKFKVLGNTDRHSIKKNLIGALLEDSGETAE
ATRLKRTARRRYTRRKNRICYLQEIFSNEMAKVDDSFFHRLEESFLVEEDKKHERHPIFGNIVD
EVAYHEKYPTIYHLRKKLVDSTDKADLRLIYLALAHMIKERGHFLIEGDLNPDNSDVDKLFIQL
VQTYNQLFEENPINASGVDAKAILSARLSKSRRLENLIAQLPGEKKNGLFGNLIALSLGLTPNF
KSNFDLAEDAKLQLSKDTYDDDLDNLLAQIGDQYADLFLAAKNLSDAILLSDILRVNTEITKAP
LSASMIKRYDEHHQDLTLLKALVRQQLPEKYKEIFFDQSKNGYAGYIDGGASQEEFYKFIKPIL
EKMDGTEELLVKLNREDLLRKQRTFDNGSIPHQIHLGELHAILRRQEDFYPFLKDNREKIEKIL
TFRIPYYVGPLARGNSRFAWMTRKSEETITPWNFEEVVDKGASAQSFIERMTNEDKNLPNEKVL
PKHSLLYEYFTVYNELTKVKYVTEGMRKPAFLSGEQKKAIVDLLFKTNRKVTVKQLKEDYFKKI
ECFDSVEISGVEDRENASLGTYHDLLKIIKDKDELDNEENEDILEDIVLTLTLFEDREMIEERL
KTYAHLFDDKVMKQLKRRRYTGWGRLSRKLINGIRDKQSGKTILDFLKSDGFANRNFMQLIHDD
SLTFKEDIQKAQVSGQGDSLHEHIANLAGSPAIKKGILQTVKVVDELVKVMGRHKPENIVIEMA
RENQTTQKGQKNSRERMKRIEEGIKELGSQILKEHPVENTQLQNEKLYLYYLQNGRDMYVDQEL
DINRLSDYDVDHIVPQSFLKDDSIDNKVLTRSDKNRGKSDNVPSEEVVKKMKNYWRQLLNAKLI
TQRKFDNLTKAERGGLSELDKAGFIKRQLVETRQITKHVAQILDSRMNTKYDENDKLIREVKVI
TLKSKLVSDFRKDFQFYKVREINNYHHAHDAYLNAVVGTALIKKYPKLESEFVYGDYKVYDVRK
MIAKSEQEIGKATAKYFFYSNIMNFFKTEITLANGEIRKRPLIETNGETGEIVWDKGRDFATVR
KVLSMPQVNIVKKTEVQTGGESKESILPKRNSDKLIARKKDWDPKKYGGFDSPTVAYSVLVVAK
VEKGKSKKLKSVKELLGITIMERSSFEKNPIDFLEAKGYKEVKKDLIIKLPKYSLFELENGRKR
MLASAGELQKGNELALPSKYVNFLYLASHYEKLKGSPEDNEQKQLFVEQHKHYLDEIIEQISEF
SKRVILADANLDKVLSAYNKHRDKPIREQAENIIHLFTLTNLGAPAAFKYEDTTIDRKRYTSTK
EVLDATLIHQSITGLYETRIDLSQLGGDSGGSGGSGGSTNLSDIIEKETGKQLVIQESILMLPE
EVEEVIGNKPESDILVHTAYDESTDENVMLLTSDAPEYKPWALVIQDSNGENKIKMLSGGSGGS
GGSTNLSDIIEKETGKQLVIQESILMLPEEVEEVIGNKPESDILVHTAYDESTDENVMLLTSDA
PEYKPWALVIQDSNGENKIKMLSGGSKRTADGSEFESPKKKRKVE;
(iii) comprises an amino acid sequence that is at least 80%, 85%, 90%, 95%, 96%, 97%, 98%, 99%, or 100% identical to:
ABE8.8-VRQR
(SEQ ID NO: 444)
MSEVEFSHEYWMRHALTLAKRARDEREVPVGAVLVLNNRVIGEGWNRAIGLHDPTAHAEIMALR
QGGLVMQNYRLIDATLYVTFEPCVMCAGAMIHSRIGRVVFGVRNAKTGAAGSLMDVLHHPGMNH
RVEITEGILADECAALLCRFFRMPRRVENAQKKAQSSTDSGGSSGGSSGSETPGTSESATPESS
GGSSGGSDKKYSIGLAIGTNSVGWAVITDEYKVPSKKFKVLGNTDRHSIKKNLIGALLEDSGET
AEATRLKRTARRRYTRRKNRICYLQEIFSNEMAKVDDSFFHRLEESFLVEEDKKHERHPIFGNI
VDEVAYHEKYPTIYHLRKKLVDSTDKADLRLIYLALAHMIKFRGHFLIEGDLNPDNSDVDKLFI
QLVQTYNQLFEENPINASGVDAKAILSARLSKSRRLENLIAQLPGEKKNGLFGNLIALSLGLTP
NFKSNFDLAEDAKLQLSKDTYDDDLDNLLAQIGDQYADLFLAAKNLSDAILLSDILRVNTEITK
APLSASMIKRYDEHHQDLTLLKALVRQQLPEKYKEIFFDQSKNGYAGYIDGGASQEEFYKFIKP
ILEKMDGTEELLVKLNREDLLRKQRTFDNGSIPHQIHLGELHAILRRQEDFYPFLKDNREKIEK
ILTFRIPYYVGPLARGNSRFAWMTRKSEETITPWNFEEVVDKGASAQSFIERMTNFDKNLPNEK
VLPKHSLLYEYFTVYNELTKVKYVTEGMRKPAFLSGEQKKAIVDLLFKTNRKVTVKQLKEDYFK
KIECFDSVEISGVEDRFNASLGTYHDLLKIIKDKDFLDNEENEDILEDIVLTLTLFEDREMIEE
RLKTYAHLFDDKVMKQLKRRRYTGWGRLSRKLINGIRDKQSGKTILDFLKSDGFANRNFMQLIH
DDSLTFKEDIQKAQVSGQGDSLHEHIANLAGSPAIKKGILQTVKVVDELVKVMGRHKPENIVIE
MARENQTTQKGQKNSRERMKRIEEGIKELGSQILKEHPVENTQLQNEKLYLYYLQNGRDMYVDQ
ELDINRLSDYDVDHIVPQSFLKDDSIDNKVLTRSDKNRGKSDNVPSEEVVKKMKNYWRQLLNAK
LITQRKFDNLTKAERGGLSELDKAGFIKRQLVETRQITKHVAQILDSRMNTKYDENDKLIREVK
VITLKSKLVSDFRKDFQFYKVREINNYHHAHDAYLNAVVGTALIKKYPKLESEFVYGDYKVYDV
RKMIAKSEQEIGKATAKYFFYSNIMNFFKTEITLANGEIRKRPLIETNGETGEIVWDKGRDFAT
VRKVLSMPQVNIVKKTEVQTGGFSKESILPKRNSDKLIARKKDWDPKKYGGFVSPTVAYSVLVV
AKVEKGKSKKLKSVKELLGITIMERSSFEKNPIDFLEAKGYKEVKKDLIIKLPKYSLFELENGR
KRMLASARELQKGNELALPSKYVNFLYLASHYEKLKGSPEDNEQKQLFVEQHKHYLDEIIEQIS
EFSKRVILADANLDKVLSAYNKHRDKPIREQAENIIHLFTLTNLGAPAAFKYEDTTIDRKQYRS
TKEVLDATLIHQSITGLYETRIDLSQLGGDEGADKRTADGSEFESPKKKRKV;
(iv) comprises an amino acid sequence that is at least 80%, 85%, 90%, 95%, 96%, 97%, 98%, 99%, or 100% identical to:
BE4-VRQR
(SEQ ID NO: 445)
MSSETGPVAVDPTLRRRIEPHEFEVFFDPRELRKETCLLYEINWGGRHSIWRHTSQNTNKHVEV
NFIEKFTTERYFCPNTRCSITWFLSWSPCGECSRAITEFLSRYPHVTLFIYIARLYHHADPRNR
QGLRDLISSGVTIQIMTEQESGYCWRNFVNYSPSNEAHWPRYPHLWVRLYVLELYCIILGLPPC
LNILRRKQPQLTFFTIALQSCHYQRLPPHILWATGLKSGGSSGGSSGSETPGTSESATPESSGG
SSGGSDKKYSIGLAIGTNSVGWAVITDEYKVPSKKFKVLGNTDRHSIKKNLIGALLFDSGETAE
ATRLKRTARRRYTRRKNRICYLQEIFSNEMAKVDDSFFHRLEESFLVEEDKKHERHPIFGNIVD
EVAYHEKYPTIYHLRKKLVDSTDKADLRLIYLALAHMIKFRGHFLIEGDLNPDNSDVDKLFIQL
VQTYNQLFEENPINASGVDAKAILSARLSKSRRLENLIAQLPGEKKNGLFGNLIALSLGLTPNF
KSNFDLAEDAKLQLSKDTYDDDLDNLLAQIGDQYADLFLAAKNLSDAILLSDILRVNTEITKAP
LSASMIKRYDEHHQDLTLLKALVRQQLPEKYKEIFFDQSKNGYAGYIDGGASQEEFYKFIKPIL
EKMDGTEELLVKLNREDLLRKQRTFDNGSIPHQIHLGELHAILRRQEDFYPFLKDNREKIEKIL
TFRIPYYVGPLARGNSRFAWMTRKSEETITPWNFEEVVDKGASAQSFIERMTNEDKNLPNEKVL
PKHSLLYEYFTVYNELTKVKYVTEGMRKPAFLSGEQKKAIVDLLFKTNRKVTVKQLKEDYFKKI
ECFDSVEISGVEDRENASLGTYHDLLKIIKDKDELDNEENEDILEDIVLTLTLFEDREMIEERL
KTYAHLFDDKVMKQLKRRRYTGWGRLSRKLINGIRDKQSGKTILDFLKSDGFANRNFMQLIHDD
SLTFKEDIQKAQVSGQGDSLHEHIANLAGSPAIKKGILQTVKVVDELVKVMGRHKPENIVIEMA
RENQTTQKGQKNSRERMKRIEEGIKELGSQILKEHPVENTQLQNEKLYLYYLQNGRDMYVDQEL
DINRLSDYDVDHIVPQSFLKDDSIDNKVLTRSDKNRGKSDNVPSEEVVKKMKNYWRQLLNAKLI
TQRKFDNLTKAERGGLSELDKAGFIKRQLVETRQITKHVAQILDSRMNTKYDENDKLIREVKVI
TLKSKLVSDFRKDFQFYKVREINNYHHAHDAYLNAVVGTALIKKYPKLESEFVYGDYKVYDVRK
MIAKSEQEIGKATAKYFFYSNIMNFFKTEITLANGEIRKRPLIETNGETGEIVWDKGRDFATVR
KVLSMPQVNIVKKTEVQTGGFSKESILPKRNSDKLIARKKDWDPKKYGGFVSPTVAYSVLVVAK
VEKGKSKKLKSVKELLGITIMERSSFEKNPIDFLEAKGYKEVKKDLIIKLPKYSLFELENGRKR
MLASARELQKGNELALPSKYVNFLYLASHYEKLKGSPEDNEQKQLFVEQHKHYLDEIIEQISEF
SKRVILADANLDKVLSAYNKHRDKPIREQAENIIHLFTLTNLGAPAAFKYEDTTIDRKQYRSTK
EVLDATLIHQSITGLYETRIDLSQLGGDSGGSGGSGGSTNLSDIIEKETGKQLVIQESILMLPE
EVEEVIGNKPESDILVHTAYDESTDENVMLLTSDAPEYKPWALVIQDSNGENKIKMLSGGSGGS
GGSTNLSDIIEKETGKQLVIQESILMLPEEVEEVIGNKPESDILVHTAYDESTDENVMLLTSDA
PEYKPWALVIQDSNGENKIKMLSGGSKRTADGSEFESPKKKRKVE;
(v) comprises an amino acid sequence that is at least 80%, 85%, 90%, 95%, 96%, 97%, 98%, 99%, or 100% identical to:
saABE8.8
(SEQ ID NO: 446)
MSEVEFSHEYWMRHALTLAKRARDEREVPVGAVLVLNNRVIGEGWNRAIGLHDPTAHAEIMALR
QGGLVMQNYRLIDATLYVTFEPCVMCAGAMIHSRIGRVVFGVRNAKTGAAGSLMDVLHHPGMNH
RVEITEGILADECAALLCRFERMPRRVENAQKKAQSSTDSGGSSGGSSGSETPGTSESATPESS
GGSSGGSKRNYILGLAIGITSVGYGIIDYETRDVIDAGVRLFKEANVENNEGRRSKRGARRLKR
RRRHRIQRVKKLLFDYNLLTDHSELSGINPYEARVKGLSQKLSEEEFSAALLHLAKRRGVHNVN
EVEEDTGNELSTKEQISRNSKALEEKYVAELQLERLKKDGEVRGSINRFKTSDYVKEAKQLLKV
QKAYHQLDQSFIDTYIDLLETRRTYYEGPGEGSPFGWKDIKEWYEMLMGHCTYFPEELRSVKYA
YNADLYNALNDLNNLVITRDENEKLEYYEKFQIIENVFKQKKKPTLKQIAKEILVNEEDIKGYR
VTSTGKPEFTNLKVYHDIKDITARKEIIENAELLDQIAKILTIYQSSEDIQEELTNLNSELTQE
EIEQISNLKGYTGTHNLSLKAINLILDELWHTNDNQIAIFNRLKLVPKKVDLSQQKEIPTTLVD
DFILSPVVKRSFIQSIKVINAIIKKYGLPNDIIIELAREKNSKDAQKMINEMQKRNRQTNERIE
EIIRTTGKENAKYLIEKIKLHDMQEGKCLYSLEAIPLEDLLNNPFNYEVDHIIPRSVSEDNSEN
NKVLVKQEENSKKGNRTPFQYLSSSDSKISYETFKKHILNLAKGKGRISKTKKEYLLEERDINR
FSVQKDFINRNLVDTRYATRGLMNLLRSYFRVNNLDVKVKSINGGFTSFLRRKWKFKKERNKGY
KHHAEDALIIANADFIFKEWKKLDKAKKVMENQMFEEKQAESMPEIETEQEYKEIFITPHQIKH
IKDFKDYKYSHRVDKKPNRELINDTLYSTRKDDKGNTLIVNNLNGLYDKDNDKLKKLINKSPEK
LLMYHHDPQTYQKLKLIMEQYGDEKNPLYKYYEETGNYLTKYSKKDNGPVIKKIKYYGNKLNAH
LDITDDYPNSRNKVVKLSLKPYRFDVYLDNGVYKFVTVKNLDVIKKENYYEVNSKCYEEAKKLK
KISNQAEFIASFYNNDLIKINGELYRVIGVNNDLLNRIEVNMIDITYREYLENMNDKRPPRIIK
TIASKTQSIKKYSTDILGNLYEVKSKKHPQIIKKGEGADKRTADGSEFESPKKKRKV;
(vi) comprises an amino acid sequence that is at least 80%, 85%, 90%, 95%, 96%, 97%, 98%, 99%, or 100% identical to:
saBE4
(SEQ ID NO: 447)
MSSETGPVAVDPTLRRRIEPHEFEVFFDPRELRKETCLLYEINWGGRHSIWRHTSQNTNKHVEV
NFIEKFTTERYFCPNTRCSITWFLSWSPCGECSRAITEFLSRYPHVTLFIYIARLYHHADPRNR
QGLRDLISSGVTIQIMTEQESGYCWRNFVNYSPSNEAHWPRYPHLWVRLYVLELYCIILGLPPC
LNILRRKQPQLTFFTIALQSCHYQRLPPHILWATGLKSGGSSGGSSGSETPGTSESATPESSGG
SSGGSGKRNYILGLAIGITSVGYGIIDYETRDVIDAGVRLFKEANVENNEGRRSKRGARRLKRR
RRHRIQRVKKLLFDYNLLTDHSELSGINPYEARVKGLSQKLSEEEFSAALLHLAKRRGVHNVNE
VEEDTGNELSTKEQISRNSKALEEKYVAELQLERLKKDGEVRGSINRFKTSDYVKEAKQLLKVQ
KAYHQLDQSFIDTYIDLLETRRTYYEGPGEGSPFGWKDIKEWYEMLMGHCTYFPEELRSVKYAY
NADLYNALNDLNNLVITRDENEKLEYYEKFQIIENVFKQKKKPTLKQIAKEILVNEEDIKGYRV
TSTGKPEFTNLKVYHDIKDITARKEIIENAELLDQIAKILTIYQSSEDIQEELTNLNSELTQEE
IEQISNLKGYTGTHNLSLKAINLILDELWHTNDNQIAIFNRLKLVPKKVDLSQQKEIPTTLVDD
FILSPVVKRSFIQSIKVINAIIKKYGLPNDIIIELAREKNSKDAQKMINEMQKRNRQTNERIEE
IIRTTGKENAKYLIEKIKLHDMQEGKCLYSLEAIPLEDLLNNPFNYEVDHIIPRSVSEDNSENN
KVLVKQEENSKKGNRTPFQYLSSSDSKISYETFKKHILNLAKGKGRISKTKKEYLLEERDINRF
SVQKDFINRNLVDTRYATRGLMNLLRSYFRVNNLDVKVKSINGGFTSFLRRKWKFKKERNKGYK
HHAEDALIIANADFIFKEWKKLDKAKKVMENQMFEEKQAESMPEIETEQEYKEIFITPHQIKHI
KDFKDYKYSHRVDKKPNRELINDTLYSTRKDDKGNTLIVNNLNGLYDKDNDKLKKLINKSPEKL
LMYHHDPQTYQKLKLIMEQYGDEKNPLYKYYEETGNYLTKYSKKDNGPVIKKIKYYGNKLNAHL
DITDDYPNSRNKVVKLSLKPYRFDVYLDNGVYKFVTVKNLDVIKKENYYEVNSKCYEEAKKLKK
ISNQAEFIASFYNNDLIKINGELYRVIGVNNDLLNRIEVNMIDITYREYLENMNDKRPPRIIKT
IASKTQSIKKYSTDILGNLYEVKSKKHPQIIKKGGSPKKKRKVSSDYKDHDGDYKDHDIDYKDD
DDKSGGSGGSGGSTNLSDIIEKETGKQLVIQESILMLPEEVEEVIGNKPESDILVHTAYDESTD
ENVMLLTSDAPEYKPWALVIQDSNGENKIKMLSGGSGGSGGSTNLSDIIEKETGKQLVIQESIL
MLPEEVEEVIGNKPESDILVHTAYDESTDENVMLLTSDAPEYKPWALVIQDSNGENKIKMLSGG
SKRTADGSEFESPKKKRKVE;
(vii) comprises an amino acid sequence that is at least 80%, 85%, 90%, 95%, 96%, 97%, 98%, 99%, or 100% identical to:
saBE4-KKH
(SEQ ID NO: 448)
MSSETGPVAVDPTLRRRIEPHEFEVFFDPRELRKETCLLYEINWGGRHSIWRHTSQNTNKHVEV
NFIEKFTTERYFCPNTRCSITWFLSWSPCGECSRAITEFLSRYPHVTLFIYIARLYHHADPRNR
QGLRDLISSGVTIQIMTEQESGYCWRNFVNYSPSNEAHWPRYPHLWVRLYVLELYCIILGLPPC
LNILRRKQPQLTFFTIALQSCHYQRLPPHILWATGLKSGGSSGGSSGSETPGTSESATPESSGG
SSGGSGKRNYILGLAIGITSVGYGIIDYETRDVIDAGVRLFKEANVENNEGRRSKRGARRLKRR
RRHRIQRVKKLLFDYNLLTDHSELSGINPYEARVKGLSQKLSEEEFSAALLHLAKRRGVHNVNE
VEEDTGNELSTKEQISRNSKALEEKYVAELQLERLKKDGEVRGSINRFKTSDYVKEAKQLLKVQ
KAYHQLDQSFIDTYIDLLETRRTYYEGPGEGSPFGWKDIKEWYEMLMGHCTYFPEELRSVKYAY
NADLYNALNDLNNLVITRDENEKLEYYEKFQIIENVFKQKKKPTLKQIAKEILVNEEDIKGYRV
TSTGKPEFTNLKVYHDIKDITARKEIIENAELLDQIAKILTIYQSSEDIQEELTNLNSELTQEE
IEQISNLKGYTGTHNLSLKAINLILDELWHTNDNQIAIFNRLKLVPKKVDLSQQKEIPTTLVDD
FILSPVVKRSFIQSIKVINAIIKKYGLPNDIIIELAREKNSKDAQKMINEMQKRNRQTNERIEE
IIRTTGKENAKYLIEKIKLHDMQEGKCLYSLEAIPLEDLLNNPENYEVDHIIPRSVSEDNSENN
KVLVKQEENSKKGNRTPFQYLSSSDSKISYETFKKHILNLAKGKGRISKTKKEYLLEERDINRF
SVQKDFINRNLVDTRYATRGLMNLLRSYFRVNNLDVKVKSINGGFTSFLRRKWKFKKERNKGYK
HHAEDALIIANADFIFKEWKKLDKAKKVMENQMFEEKQAESMPEIETEQEYKEIFITPHQIKHI
KDFKDYKYSHRVDKKPNRKLINDTLYSTRKDDKGNTLIVNNLNGLYDKDNDKLKKLINKSPEKL
LMYHHDPQTYQKLKLIMEQYGDEKNPLYKYYEETGNYLTKYSKKDNGPVIKKIKYYGNKLNAHL
DITDDYPNSRNKVVKLSLKPYRFDVYLDNGVYKFVTVKNLDVIKKENYYEVNSKCYEEAKKLKK
ISNQAEFIASFYKNDLIKINGELYRVIGVNNDLLNRIEVNMIDITYREYLENMNDKRPPHIIKT
IASKTQSIKKYSTDILGNLYEVKSKKHPQIIKKGGSPKKKRKVSSDYKDHDGDYKDHDIDYKDD
DDKSGGSGGSGGSTNLSDIIEKETGKQLVIQESILMLPEEVEEVIGNKPESDILVHTAYDESTD
ENVMLLTSDAPEYKPWALVIQDSNGENKIKMLSGGSGGSGGSTNLSDIIEKETGKQLVIQESIL
MLPEEVEEVIGNKPESDILVHTAYDESTDENVMLLTSDAPEYKPWALVIQDSNGENKIKMLSGG
SKRTADGSEFESPKKKRKVE;
or
(viii) comprises an amino acid sequence that is at least 80%, 85%, 90%, 95%, 96%, 97%, 98%, 99%, or 100% identical to:
ABE-bhCAS12b
(SEQ ID NO: 449)
MSEVEFSHEYWMRHALTLAKRARDEREVPVGAVLVLNNRVIGEGWNRAIGLHDPTAHAEIMALR
QGGLVMQNYRLYDATLYVTFEPCVMCAGAMIHSRIGRVVFGVRNAKTGAAGSLMDVLHHPGMNH
RVEITEGILADECAALLCRFFRMPRRVENAQKKAQSSTDGSSGSETPGTSESATPESSGAPKKK
RKVGIHGVPAAATRSFILKIEPNEEVKKGLWKTHEVLNHGIAYYMNILKLIRQEAIYEHHEQDP
KNPKKVSKAEIQAELWDFVLKMQKCNSFTHEVDKDEVENILRELYEELVPSSVEKKGEANQLSN
KFLYPLVDPNSQSGKGTASSGRKPRWYNLKIAGDPSWEEEKKKWEEDKKKDPLAKILGKLAEYG
LIPLFIPYTDSNEPIVKEIKWMEKSRNQSVRRLDKDMFIQALERFLSWESWNLKVKEEYEKVEK
EYKTLEERIKEDIQALKALEQYEKERQEQLLRDTLNTNEYRLSKRGLRGWREIIQKWLKMDENE
PSEKYLEVEKDYQRKHPREAGDYSVYEFLSKKENHFIWRNHPEYPYLYATFCEIDKKKKDAKQQ
ATFTLADPINHPLWVRFEERSGSNLNKYRILTEQLHTEKLKKKLTVQLDRLIYPTESGGWEEKG
KVDIVLLPSRQFYNQIFLDIEEKGKHAFTYKDESIKFPLKGTLGGARVQFDRDHLRRYPHKVES
GNVGRIYENMTVNIEPTESPVSKSLKIHRDDFPKVVNFKPKELTEWIKDSKGKKLKSGIESLEI
GLRVMSIALGQRQAAAASIFEVVDQKPDIEGKLFFPIKGTELYAVHRASFNIKLPGETLVKSRE
VLRKAREDNLKLMNQKLNFLRNVLHFQQFEDITEREKRVTKWISRQENSDVPLVYQDELIQIRE
LMYKPYKDWVAFLKQLHKRLEVEIGKEVKHWRKSLSDGRKGLYGISLKNIDEIDRTRKELLRWS
LRPTEPGEVRRLEPGQRFAIDQLNHLNALKEDRLKKMANTIIMHALGYCYDVRKKKWQAKNPAC
QIILFEDLSNYNPYKERSRFENSRLMKWSRREIPRQVALQGEIYGLQVGEVGAQFSSRFHAKTG
SPGIRCRVVTKEKLQDNRFFKNLQREGRLTLDKIAVLKEGDLYPDKGGEKFISLSKDRKCVTTH
ADINAAQNLQKRFWTRTHGFYKVYCKAYQVDGQTVYIPESKDQKQKIIEEFGEGYFILKDGVYE
WVNAGKLKIKKGSSKQSSSELVDSDILKDSFDLASELKGEKLMLYRDPSGNVEPSDKWMAAGVE
FGKLERILISKLTNQYSISTIEDDSSKQSMKRPAATKKAGQAKKKK.

23. The composition of claim 20, wherein the guide RNA(s) comprises a nucleotide sequence selected from one or more of those sequences listed in Table 1, Table 2A, or Table 2B; or any of the aforementioned sequences wherein 1, 2, 3, 4, or 5 nucleotides is deleted from the 5′ and/or 3′ terminus of the nucleotide sequence.

24. The composition of claim 20, wherein the guide RNA(s) comprises a nucleotide sequence selected from the group consisting of:
(SEQ ID NO: 408; sgRNA_361/gRNA1598)
5′-UAUAGGAAAACCAGUGAGUC-3′;
(SEQ ID NO: 409; sgRNA_362/gRNA1599)
5′-UACUCACCUCUGCAUGCUCA-3′;
(SEQ ID NO: 410; sgRNA_363/gRNA1606)
5′-ACUCACCUCUGCAUGCUCAU-3′;
(SEQ ID NO: 412; sgRNA_365)
5′-AUACUCACCUCUGCAUGCUCA-3′;
(SEQ ID NO: 414; sgRNA_367/gRNA-#19)
5′-UUGGCAGGAUGGCUUCUCAUCG-3′;
(SEQ ID NO: 422; sgRNA_375)
5′-GGCUAUCGUCACCAAUCCCA-3′;
(SEQ ID NO: 423; sgRNA_376)
5′-GCUAUCGUCACCAAUCCCAA-3′;
(SEQ ID NO: 561; gRNA1604)
5′-ACACCUUAUAGGAAAACCAG-3′;
(SEQ ID NO: 554; gRNA1597)
5′-CUCUCAUAGGUGGUAUUCAC-3′;
(SEQ ID NO: 557; gRNA1600)
5′-GCAACUUACCCAGAGGCAAA-3′;
(SEQ ID NO: 551; gRNA1594)
5′-CAACUUACCCAGAGGCAAAU-3′;
(SEQ ID NO: 558; gRNA1601)
5′-UCUGUAUACUCACCUCUGCA-3′;
(SEQ ID NO: 462; gRNA1756)
5′-CAAAUAUGAACCUUGUCUAG-3′;
(SEQ ID NO: 470; gRNA1764)
5′-GAACCUUGUCUAGAGAGAUU-3′;
(SEQ ID NO: 492; gRNA1786)
5′-UGAGUAUAAAAGCCCCAGGC-3′;
and
(SEQ ID NO: 478; gRNA1772)
5′-GCCAUCCUGCCAAGAAUGAG-3′;
(SEQ ID NO: 409; sgRNA_362/gRNA1599)
5′-UACUCACCUCUGCAUGCUCA-3′,
(SEQ ID NO: 410; sgRNA_363/gRNA1606)
5′-ACUCACCUCUGCAUGCUCAU-3′,
(SEQ ID NO: 411; sgRNA_364)
5′-UACCACCUAUGAGAGAAGAC-3′,
(SEQ ID NO: 412; sgRNA_365)
5′-AUACUCACCUCUGCAUGCUCA-3′,
(SEQ ID NO: 413; sgRNA_366)
5′-ACUGGUUUUCCUAUAAGGUGU-3′,
(SEQ ID NO: 551; gRNA1594)
5′-CAACUUACCCAGAGGCAAAU-3′,
and
(SEQ ID NO: 496; gRNA1790)
5′-UGUUGACUAAGUCAAUAAUC-3′;
or any of the aforementioned sequences wherein 1, 2, 3, 4, or 5 nucleotides is deleted from the 5′ and/or 3′ terminus of the nucleotide sequence.

25. A composition comprising one or more polynucleotides encoding an endonuclease and a guide RNA, wherein the guide RNA comprises a nucleic acid sequence that is complementary to a transthyretin (TTR) polynucleotide, and wherein the endonuclease comprises the amino acid sequence:
bhCas12b
(SEQ ID NO: 450)
v4MAPKKKRKVGIHGVPAAATRSFILKIEPNEEVKKGLWKTHEVLNHGIAYYMNILKLIRQEAI
YEHHEQDPKNPKKVSKAEIQAELWDFVLKMQKCNSFTHEVDKDEVENILRELYEELVPSSVEKK
GEANQLSNKFLYPLVDPNSQSGKGTASSGRKPRWYNLKIAGDPSWEEEKKKWEEDKKKDPLAKI
LGKLAEYGLIPLFIPYTDSNEPIVKEIKWMEKSRNQSVRRLDKDMFIQALERFLSWESWNLKVK
EEYEKVEKEYKTLEERIKEDIQALKALEQYEKERQEQLLRDTLNTNEYRLSKRGLRGWREIIQK
WLKMDENEPSEKYLEVFKDYQRKHPREAGDYSVYEFLSKKENHFIWRNHPEYPYLYATFCEIDK
KKKDAKQQATFTLADPINHPLWVRFEERSGSNLNKYRILTEQLHTEKLKKKLTVQLDRLIYPTE
SGGWEEKGKVDIVLLPSRQFYNQIFLDIEEKGKHAFTYKDESIKFPLKGTLGGARVQFDRDHLR
RYPHKVESGNVGRIYFNMTVNIEPTESPVSKSLKIHRDDFPKVVNFKPKELTEWIKDSKGKKLK
SGIESLEIGLRVMSIDLGQRQAAAASIFEVVDQKPDIEGKLFFPIKGTELYAVHRASENIKLPG
ETLVKSREVLRKAREDNLKLMNQKLNFLRNVLHFQQFEDITEREKRVTKWISRQENSDVPLVYQ
DELIQIRELMYKPYKDWVAFLKQLHKRLEVEIGKEVKHWRKSLSDGRKGLYGISLKNIDEIDRT
RKFLLRWSLRPTEPGEVRRLEPGQRFAIDQLNHLNALKEDRLKKMANTIIMHALGYCYDVRKKK
WQAKNPACQIILFEDLSNYNPYGERSRFENSRLMKWSRREIPRQVALQGEIYGLQVGEVGAQFS
SRFHAKTGSPGIRCRVVTKEKLQDNRFFKNLQREGRLTLDKIAVLKEGDLYPDKGGEKFISLSK
DRKCVTTHADINAAQNLQKRFWTRTHGFYKVYCKAYQVDGQTVYIPESKDQKQKIIEEFGEGYF
ILKDGVYEWVNAGKLKIKKGSSKQSSSELVDSDILKDSFDLASELKGEKLMLYRDPSGNVEPSD
KWMAAGVFFGKLERILISKLTNQYSISTIEDDSSKQSMSGGSKRTADGSEFESPKKKRKVE,
wherein said guide RNA targets said endonuclease to effect a double-stranded break of the TTR polynucleotide sequence.

26. The composition of claim 25, wherein the guide RNA comprises a nucleotide sequence, selected from the group consisting of:
(SEQ ID NO: 415; sgRNA_368)
5′-UCCUAUAAGGUGUGAAAGUCUG-3′,
(SEQ ID NO: 416; sgRNA_369)
5′-UGAGCCCAUGCAGCUCUCCAGA-3′,
(SEQ ID NO: 417; sgRNA_370)
5′-CUCCUCAGUUGUGAGCCCAUGC-3′,
(SEQ ID NO: 418; sgRNA_371)
5′-GUAGAAGGGAUAUACAAAGUGG-3′,
(SEQ ID NO: 419; sgRNA_372)
5′-CCACUUUGUAUAUCCCUUCUAC-3′,
(SEQ ID NO: 420; sgRNA_373)
5′-GGUGUCUAUUUCCACUUUGUAU-3′,
and
(SEQ ID NO: 421; sgRNA_374)
5′-CAUGAGCAUGCAGAGGUGAGUA-3′;
or any of the aforementioned sequences wherein nucleobases 1, 2, 3, 4, or 5 nucleotides is deleted from the 5′ and/or 3′ terminus of the nucleotide sequence.

27. A pharmaceutical composition for the treatment of transthyretin (TTR) amyloidosis, the pharmaceutical composition comprising: an endonuclease, or a nucleic acid encoding the endonuclease, and a guide RNA (gRNA) comprising a nucleic acid sequence complementary to an transthyretin (TTR) polynucleotide in a pharmaceutically acceptable excipient, wherein the endonuclease comprises the amino acid sequence:
bhCas12b
(SEQ ID NO: 450)
v4MAPKKKRKVGIHGVPAAATRSFILKIEPNEEVKKGLWKTHEVLNHGIAYYMNILKLIRQEAI
YEHHEQDPKNPKKVSKAEIQAELWDFVLKMQKCNSFTHEVDKDEVENILRELYEELVPSSVEKK
GEANQLSNKFLYPLVDPNSQSGKGTASSGRKPRWYNLKIAGDPSWEEEKKKWEEDKKKDPLAKI
LGKLAEYGLIPLFIPYTDSNEPIVKEIKWMEKSRNQSVRRLDKDMFIQALERFLSWESWNLKVK
EEYEKVEKEYKTLEERIKEDIQALKALEQYEKERQEQLLRDTLNTNEYRLSKRGLRGWREIIQK
WLKMDENEPSEKYLEVFKDYQRKHPREAGDYSVYEFLSKKENHFIWRNHPEYPYLYATFCEIDK
KKKDAKQQATFTLADPINHPLWVRFEERSGSNLNKYRILTEQLHTEKLKKKLTVQLDRLIYPTE
SGGWEEKGKVDIVLLPSRQFYNQIFLDIEEKGKHAFTYKDESIKFPLKGTLGGARVQFDRDHLR
RYPHKVESGNVGRIYFNMTVNIEPTESPVSKSLKIHRDDFPKVVNFKPKELTEWIKDSKGKKLK
SGIESLEIGLRVMSIDLGQRQAAAASIFEVVDQKPDIEGKLFFPIKGTELYAVHRASENIKLPG
ETLVKSREVLRKAREDNLKLMNQKLNFLRNVLHFQQFEDITEREKRVTKWISRQENSDVPLVYQ
DELIQIRELMYKPYKDWVAFLKQLHKRLEVEIGKEVKHWRKSLSDGRKGLYGISLKNIDEIDRT
RKFLLRWSLRPTEPGEVRRLEPGQRFAIDQLNHLNALKEDRLKKMANTIIMHALGYCYDVRKKK
WQAKNPACQIILFEDLSNYNPYGERSRFENSRLMKWSRREIPRQVALQGEIYGLQVGEVGAQFS
SRFHAKTGSPGIRCRVVTKEKLQDNRFFKNLQREGRLTLDKIAVLKEGDLYPDKGGEKFISLSK
DRKCVTTHADINAAQNLQKRFWTRTHGFYKVYCKAYQVDGQTVYIPESKDQKQKIIEEFGEGYF
ILKDGVYEWVNAGKLKIKKGSSKQSSSELVDSDILKDSFDLASELKGEKLMLYRDPSGNVEPSD
KWMAAGVFFGKLERILISKLTNQYSISTIEDDSSKQSMSGGSKRTADGSEFESPKKKRKVE,
wherein said guide RNA targets said endonuclease to effect a double-stranded break of the TTR polynucleotide sequence wherein the guide RNA(s) comprises a nucleotide sequence selected from one or more of those sequences listed in Table 1, Table 2A, or Table 2B; or any of the aforementioned sequences wherein 1, 2, 3, 4, or 5 nucleotides is deleted from the 5′ and/or 3′ terminus of the nucleotide sequence.

28. A method for treating amyloidosis in a subject, the method comprising systemically administering to the subject a guide RNA and a fusion protein comprising a polynucleotide programmable DNA binding domain and a deaminase domain, wherein said guide RNA targets said base editor to effect an alteration of a nucleobase of the TTR polynucleotide sequence present in a liver cell of the subject.
